(19) United States
(12) Patent Application Publication
(10) Pub. No.: US 2002/0133852 A1
(43) Pub. Date: Sep. 19, 2002

(54) Soybean SSRs and methods of genotyping

(76) Inventors: Brian M. Hauge, Beverly, MA (US); Roger J. Effertz, St. Louis, MO (US)

Correspondence Address: MONSANTO COMPANY, 800 N. LINDBERGH BLVD., ATTENTION: G.P. WUELLNER, IP PARALEGAL, (E2NA), ST. LOUIS, MO, 63167, US

(21) Appl. No.: 09/969,373

(22) Filed: Oct. 2, 2001

Related U.S. Application Data
(63) Continuation-in-part of application No. 09/754,853, filed on Jan. 5, 2001.
(63) Continuation-in-part of application No. 09/760,427, filed on Jan. 13, 2001, now abandoned.
(63) Continuation-in-part of application No. 09/855,768, filed on May 15, 2001.
(60) Provisional application No. 60/174,880, filed on Jan. 7, 2000.

(51) Int. Cl. C12Q 1/68; G06F 19/00; G01N 33/48; G01N 33/50; A01H 5/00; C07H 21/04

(52) U.S. Cl. 800/312; 435/6; 702/20; 536/23.2

(57) ABSTRACT

SSR-containing soybean DNA loci useful for genotyping between at least two varieties of soybean. Sequences of the loci are useful for designing primers and probe oligonucleotides for detecting SSR polymorphisms in soybean DNA. SSR polymorphisms are useful for genotyping applications in soybean. The SSR-containing loci are useful to establish marker/trait associations, e.g. in linkage disequilibrium mapping and association studies, positional cloning and transgenic applications, marker-aided breeding and marker-assisted selection, hybrid prediction and identity by descent studies. The SSR markers are also useful in mapping libraries of DNA clones, e.g. for soybean QTLs and genes linked to SSR polymorphisms.

### CROSS-REFERENCE TO RELATED APPLICATIONS

[0001] This application is a continuation in part and claims priority under 35 U.S.C. §120 of U.S. applications Ser. No. 09/754,853 filed Jan. 5, 2001 (which claims priority to provisional application No. 60/174,880 filed Jan. 7, 2000), Ser. No. 09/760,427 filed Jan. 13, 2001, and Ser. No. 09/855,768 filed May 15, 2001, the disclosures of which are incorporated herein by reference in their entireties.

### INCORPORATION OF SEQUENCE LISTING

[0002] Two copies of the sequence listing (Copy 1 and Copy 2) and a computer readable form (CRF) of the sequence listing, all on CD-ROMs, each containing the file named pa_{—}00362.rpt, which is 938 kilobytes (measured in MS-Windows NT) and was created on 09-28-2001 are herein incorporated by reference.

### INCORPORATION OF TABLE

[0003] Two copies of Table 1 on CD-ROMs, each containing the file named pa_{—}00362.txt, which is 181 kilobytes (measured in MS-Windows NT) and was created on 09-28-2001, are herein incorporated by reference.

### FIELD OF THE INVENTION

[0004] Disclosed herein are simple sequence repeats (SSRs) of nucleic acids in soybean genomic DNA, nucleic acid molecules associated with such SSRs and methods of using such SSRs and molecules, e.g. in genotyping. Polymorphic SSRs are usefully associated with a variety of genes and QTLs including SCN resistance on linkage groups A2 and G.

### BACKGROUND

[0005] Polymorphisms are useful as genetic markers for genotyping applications in the agriculture field, e.g. in plant genetic studies and commercial breeding. See for instance U.S. Pat. Nos. 5,385,835; 5,437,697; 5,385,835; 5,492,547; 5,746,023; 5,962,764; 5,981,832; 6,100,030 and 6,219,964, the disclosures of all of which are incorporated herein by reference. The highly conserved nature of DNA combined with stable polymorphisms provide genetic markers which are both predictable and discerning of different genotypes. Among the classes of existing genetic markers are a variety of polymorphisms indicating genetic variation including restriction-fragment-length polymorphisms (RFLPs), amplified fragment-length polymorphisms (AFLPs), microsatellite or simple sequence repeats, single nucleotide polymorphisms (SNPs) and insertion/deletion polymorphisms (Indels). SSR markers are single locus markers with multiple alleles; and they are presently the DNA marker of choice in soybean marker applications because of their simplicity and their many alleles, which enables detection of polymorphism among elite cultivars and breeding lines. SSRs are well distributed throughout the soybean genome and have been used to distinguish the genotype of soybean cultivars and elite breeding lines. These methods have been developed for soybean and are well known in the field of molecular plant breeding (Rongwen, Theor. Appl. Gen. 90:43-48 (1995); Akkaya, Crop Sci. 35:1439-1445 (1995); Mansur, Crop Sci. 36:1327-1336 (1996); Diwan, Theor. Appl. Gen. 95:723-733 (1997); Simple sequence repeat DNA marker analysis, in “DNA markers: Protocols, applications, and overviews: (1997) 173-185, Cregan, et al., eds., Wiley-Liss N.Y.; all of which is herein incorporated by reference in its' entirely. In a particularly preferred embodiment, a marker molecule is detected by SSR techniques. It is understood that SSR primers can hybridize to a combination of plant DNA and adapter DNA (e.g. EcoRI adapter or MseI adapter, Vos et al., Nucleic Acids Res. 23:4407-4414 (1995)).

[0006] Technological advances during the past 75 years have enabled U.S. soybean producers to more than triple average soybean yield from 12 bushels per acre in 1924 to nearly 40 bushels per acre in recent years. A substantial part of the yield increase is attributed to genetic improvement through breeding. Because the number of genetic markers for soybean is limited, the discovery of additional genetic markers will facilitate improvements from marker-assisted breeding and other genotyping applications such as marker-trait association studies, gene mapping, gene discovery and marker-assisted selection. A limited number of soybean markers are available. Reference is made to the SoyBase web site maintained by the USDA and Iowa State University at “macgrant.agron.iastate.edu” which provides soybean loci for morphological, biochemical and molecular markers including soybean SSR markers and PCR primers used to amplify SSR loci. However, to obtain adequate genome wide coverage for quantitative trait loci (QTL) analysis and marker assisted breeding applications, development of additional SSRs is desirable.

### SUMMARY OF THE INVENTION

[0007] This invention provides a large number of SSRs which can be useful as genetic markers for soybean. These genetic markers comprise soybean DNA loci which are useful for genotyping applications. A soybean locus of this invention comprises at least 15, more preferably at least 18, even more preferably at least 20, consecutive nucleotides adjacent to an SSR. Table 1 provides a list of 1531 SSR-containing loci in selected regions of soybean linkage groups A1, G, A2, H and M including the previously-known SSR markers Satt315, Satt632, Sat_{—}162 and Satt424 on linkage group A2 and Satt275, Satt163, Sat_{—}168, Satt309, Sat_{—}141, Sat_{—}163, Satt610, Satt570 and Satt235 on linkage group G. More particularly, a soybean locus of this invention has a nucleic acid sequence which is at least 90%, preferably at least 95%, identical to the sequence of the same number of nucleotides in either strand of a segment of soybean DNA which is adjacent to the SSR.

[0008] In one aspect of the invention the soybean loci are provided in one or more data sets of DNA sequences, i.e. data sets comprising up to a finite number of distinct sequences of SSR containing loci. The finite number of SSR loci in a data set can be as few as 2 or up to 1000 or more, e.g. at least 5, 10, 25, 40, 75, 100 or 500 loci. Such data sets are useful for genotyping applications of a large scale or involving large numbers of plants. In a useful aspect of the invention the data set of soybean SSR loci is recorded on a computer readable medium.

[0009] In another aspect of the invention the SSRs in the loci of the invention are mapped onto the soybean genome, e.g. as a genetic map of the soybean genome comprising map positions of SSRs, as illustrated in FIGS. 1 and 2, or as a physical map of SSR positions as indicated in Table 1 for the SSR-containing loci of SEQ ID NO:1 through SEQ ID NO:1531. The genetic linkage data can also be recorded on computer readable medium. Preferred embodiments of the invention provide genetic maps of SSRs at high densities across a map of a region of soybean genome. Especially useful genetic maps comprise SSR markers at an average distance of not more than 10 centiMorgans (cM) on a linkage group, e.g. not more than 5 cM, more preferably at an average distance between markers of not more than 2 cM, e.g. not more than 1 cM, even more preferably at an average distance between markers of not more than 0.5 cM in a region of a soybean genome.

[0010] This invention also provides nucleic acid molecules for identifying SSR polymorphisms; such molecules are preferably oligonucleotides which are useful as PCR primers for amplifying a segment of a soybean genome, e.g. a polymorphic locus, and hybridization probes for use in assays to identify in soybean DNA the presence or absence of particular polymorphisms. Nucleic acid molecules useful as PCR primers are typically provided in pairs for the amplification of a segment of soybean DNA comprising at least one polymorphism, where each molecule comprises at least 12, more usually at least 15, nucleotide bases. The nucleotide sequence of one of the primer molecules is preferably at least 90 percent identical to a sequence of the same number of consecutive nucleotides in one strand of a segment of soybean DNA in a polymorphic locus and the sequence of the other of the primer molecules is at least 90 percent identical to a sequence of the same number of consecutive nucleotides in the other strand of said segment of soybean DNA in the polymorphic locus. In addition to the designed complementary sequence a primer can have tags, e.g. a polynucleotide sequence useful for analytical assay at the 5′ end of the primer. Preferably the primers are capable of hybridizing under high stringency conditions to the strands of DNA in the polymorphic locus. Preferably such primers are provided and used in pairs which flank at least one polymorphism in the segment of soybean DNA in a polymorphic locus. Reference is made to the SEQ ID No: 1532 through SEQ ID NO:4593 in Table 1 which identifies nucleic acid sequences for forward and reverse primers for the SSR-containing loci of SEQ ID NO: 1 through SEQ ID NO: 1531.

[0011] This invention also provides methods of using the loci and polymorphism of this invention, e.g. in genotyping and related applications. One aspect. of this invention provides methods of finding polymorphisms in soybean DNA by comparing DNA sequence in at least two soybean lines where the sequence is selected by using oligonucleotide primers which are designed to amplify the polymorphic soybean DNA locus.

[0012] This invention also provides methods of genotyping by assaying DNA or mRNA from tissue of at least one soybean line to identify the presence of an SSR polymorphism linked to a polymorphic locus of this invention. In preferred aspects of the invention genotyping uses an SSR polymorphism identified in soybean linkage group A2 or G. In another preferred aspect of the invention genotyping comprises identifying one or more phenotypic traits for at least two soybean lines and determining associations between traits and polymorphisms, e.g. lines with complementary traits are identified and selected for breeding to improve heterosis. Assays for such genotyping can employ sufficient nucleic acid molecules to identify the presence of at least 2 and up to 5000 or more distinct polymorphisms, e.g. where the number of distinct polymorphisms is at least 5, 10, 25, 40, 75, 100, 500, 1000, 2000, 3000 or 4000.

[0013] This invention also provides methods of investigating a soybean allele by determining the presence of a polymorphism in the nucleic acid sequence of nucleic acid molecules isolated from one or more soybean plants where the polymorphism is linked to a polymorphic locus of the invention.

[0014] This invention also provides methods of mapping soybean genomic sequence by identifying the presence of a mapped polymorphism in the genomic sequence where the mapped polymorphism is linked to a polymorphic locus of the invention, e.g. a mapped polymorphism on a genetic map of this invention.

[0015] This invention also provides methods of breeding soybean by selecting a soybean line having a polymorphism associated by linkage disequilibrium to a trait of interest where the polymorphism is linked to a polymorphic locus of the invention.

[0016] This invention also provides methods of associating a phenotype to a genotype in soybean plants by identifying a set of one or more distinct phenotypic traits characterizing the soybean plants. DNA or mRNA in tissue from at least two soybean plants having allelic DNA is assayed to identify the presence or absence of a set of distinct SSR polymorphisms. Associations between the set of SSR polymorphisms and set of phenotypic traits are identified where the set of SSR polymorphisms comprises at least one, more preferably at least 10, SSR-containing locus of the invention, e.g. at least 10 SSR polymorphisms linked to mapped SSR-containing loci of this invention. In a more preferred aspect traits are associated to genotypes in a segregating population of soybean plants having allelic DNA in loci of a chromosome which confers a phenotypic effect on a trait of interest and where a polymorphism is located in such loci and where the degree of association among the polymorphisms and between the polymorphisms and the traits permits determination of a linear order of the polymorphism and the trait loci. In such methods polymorphisms are linked to loci permitting disequilibrium mapping of the loci.

[0017] This invention also provides methods of identifying genes associated with a trait of interest by identifying linkage of at least one polymorphism to a trait of interest where the polymorphism is linked to a polymorphic locus of the invention, identifying a genomic clone containing the locus and identifying genes linked to the locus. In preferred aspects of the invention such association is useful in marker assisted breeding an/or marker assisted selection.

[0018] This invention also provides methods to screen for traits by interrogating a collection of SSR polymorphisms at an average density of less than 10 cM on a genetic map of soybean. The presence or absence of an SSR polymorphism linked to a polymorphic locus of the invention is correlated such traits.

### BRIEF DESCRIPTION OF THE DRAWINGS

[0019] FIGS. 1 and 2 are cytogenetic, genetic and physical maps for regions of soybean linkage groups A2 and G comprising SSR-containing loci.

[0020] Definitions:

[0021] As used herein certain terms are defined as follows.

[0022] An “SSR” means a simple sequence repeat of DNA sequence.

[0023] An “allele” means an alternative sequence at a particular locus; the length of an allele can be as small as 1 nucleotide base, but is typically larger. Allelic sequence can be amino acid sequence or nucleic acid sequence. A “locus” is a short sequence that is usually unique and usually found at one particular location by a point of reference, e.g. a short DNA sequence that is a gene, or part of a gene or intergenic region. A locus of this invention comprises an SSR and an adjacent segment that is sufficiently long as to be amplified to a unique PCR product. The loci of this invention comprise an SSR that is a polymorphism in at least certain individuals. “Genotype” means the specification of an allelic composition at one or more loci within an individual organism. In the case of diploid organisms, there are two alleles at each locus; a diploid genotype is said to be homozygous when the alleles are the same, and heterozygous when the alleles are different.

[0024] “Phenotype” means the detectable characteristics of a cell or organism which are a manifestation of gene expression.

[0025] “Marker” mean polymorphic sequence. A “polymorphism” is a variation among individuals in sequence, particularly in DNA sequence. Useful polymorphisms of this invention include SSRs.

[0026] “Marker Assay” means an method for detecting a polymorphism at a particular locus using a particular method, e.g. phenotype (such as seed color, flower color, or other visually detectable trait), electrophoresis, e.g. gel electrophoresis such as Southern blots, of length polymorphisms associated with SSRs.

[0027] “Linkage Group” refers to a soybean chromosome. As the nomenclature of soybean linkage groups has been changing, the following table correlates linkage group nomenclature.

| Linkage Group | Linkage Group |
|---|---|
| Number Designation | Letter Designation |
| 1 | J |
| 2 | E |
| 3 | A2 |
| 4 | B1 |
| 5 | G |
| 6 | N |
| 7 | A1 |
| 8 | D1a + Q |
| 9 | C2 |
| 10 | H |
| 11 | M |
| 12 | D2 |
| 13 | F |
| 14 | L |
| 15 | I |
| 16 | D1b + W |
| 17 | O |
| 18 | C1 |
| 19 | K |
| 20 | B2 |

[0028] Reference to linkage groups in connection with describing the markers of this invention is by reference to the alphabetic designations, e.g. A2, G, A1, H and M.

[0029] “Linkage” refers to relative frequency at which types of gametes are produced in a cross. For example, if locus A has allele “A” or “a” and locus B has allele “B” or “b” and a cross between parent I with AABB and parent B with aabb will produce four possible gametes where the alleles are segregated into AB, Ab, aB and ab. The null expectation is that there will be independent equal segregation into each of the four possible genotypes, i.e. with no linkage ¼ of the gametes will of each genotype. Segregation of gametes into a genotypes differing from ¼ are attributed to linkage.

[0030] “Linkage disequilibrium” is defined in the context of the relative frequency of gamete types in a population of many individuals in a single generation. If the frequency of allele A is p, a is p′, B is q and b is q′, then the expected frequency (with no linkage disequilibrium) of genotype AB is pq, Ab is pq′, aB is p′q and alb is p′q′. Any deviation from the expected frequency is called linkage disequilibrium. Two loci are said to be “genetically linked” when they are in linkage disequilibrium

[0031] “Quantitative Trait Locus (QTL)” means a locus that controls to some degree numerically representable traits that are usually continuously distributed.

[0032] Nucleic acid molecules or fragments thereof of the present invention are capable of hybridizing to other nucleic acid molecules under certain circumstances. As used herein, two nucleic acid molecules are said to be capable of hybridizing to one another if the two molecules are capable of forming an anti-parallel, double-stranded nucleic acid structure. A nucleic acid molecule is said to be the “complement” of another nucleic acid molecule if they exhibit “complete complementarity” i.e. each nucleotide in one sequence is complementary to its base pairing partner nucleotide in another sequence. Two molecules are said to be “minimally complementary” if they can hybridize to one another with sufficient stability to permit them to remain annealed to one another under at least conventional “low-stringency” conditions. Similarly, the molecules are said to be “complementary” if they can hybridize to one another with sufficient stability to permit them to remain annealed to one another under conventional “high-stringency” conditions. Nucleic acid molecules which hybridize to other nucleic acid molecules, e.g. at least under low stringency conditions are said to be “hybridizable cognates” of the other nucleic acid molecules. Conventional stringency conditions are described by Sambrook et al., Molecular Cloning, A Laboratory Manual, 2nd Ed., Cold Spring Harbor Press, Cold Spring Harbor, N.Y. (1989) and by Haymes et al., Nucleic Acid Hybridization, A Practical Approach, IRL Press, Washington, D.C. (1985), each of which is incorporated herein by reference. Departures from complete complementarity are therefore permissible, as long as such departures do not completely preclude the capacity of the molecules to form a double-stranded structure. Thus, in order for a nucleic acid molecule to serve as a primer or probe it need only be sufficiently complementary in sequence to be able to form a stable double-stranded structure under the particular solvent and salt concentrations employed.

[0033] Appropriate stringency conditions which promote DNA hybridization, for example, 6.0× sodium chloride/sodium citrate (SSC) at about 45° C., followed by a wash of 2.0× SSC at 50° C., are known to those skilled in the art or can be found in Current Protocols in Molecular Biology, John Wiley & Sons, N.Y. (1989), 6.3.1-6.3.6, incorporated herein by reference. For example, the salt concentration in the wash step can be selected from a low stringency of about 2.0× SSC at 50° C. to a high stringency of about 0.2× SSC at 50° C. In addition, the temperature in the wash step can be increased from low stringency conditions at room temperature, about 22° C., to high stringency conditions at about 65° C. Both temperature and salt may be varied, or either the temperature or the salt concentration may be held constant while the other variable is changed.

[0034] In a preferred embodiment, a nucleic acid molecule of the present invention will specifically hybridize to one strand of a segment of soybean DNA having a nucleic acid sequence as set forth in SEQ ID NO: 1 through SEQ ID NO: 1531 under moderately stringent conditions, for example at about 2.0× SSC and about 65° C., more preferably under high stringency conditions such as 0.2× SSC and about 65° C.

[0035] As used herein “sequence identity” refers to the extent to which two optimally aligned polynucleotide or peptide sequences are invariant throughout a window of alignment of components, e.g. nucleotides or amino acids. An “identity fraction” for aligned segments of a test sequence and a reference sequence is the number of identical components which are shared by the two aligned sequences divided by the total number of components in reference sequence segment, i.e. the entire reference sequence or a smaller defined part of the reference sequence. “Percent identity” is the identity fraction times 100.

### DETAILED DESCRIPTION OF PREFERRED EMBODIMENTS

[0036] A. Nucleic Acid Molecules—Loci, Primers and Probes

[0037] The SSR-containing loci identified by SEQ ID NO: 1 through SEQ ID NO: 1531 in Table 1 represent soybean DNA loci having SSRs which are useful as markers for genotyping between two or more varieties of soybean. The 1531 SSR-containing loci in Table 1 are found in selected regions of linkages groups A2, G, A1, H and M and include the markers of this invention and previously-known SSR markers, i.e. Satt315 (SEQ ID NO:8), Satt632 (SEQ ID NO: 58), Sat_{—}162 (SEQ ID NO:182) and Satt424 (SEQ ID NO:472) on linkage group A2 and Satt275 (SEQ ID NO:560), Satt163 (SEQ ID NO:658), Sat_{—}168 (SEQ ID NO:798), Satt309 (SEQ ID NO:819), Sat_{—}141 (SEQ ID NO: 1063), Sat_{—}163 (SEQ ID NO:1065), Satt610 (SEQ ID NO:1181), Satt570 (SEQ ID NO:1249) and Satt235 (SEQ ID NO:1303) on linkage group G.

[0038] Each SSR-containing soybean DNA locus comprises an SSR flanked by reference polynucleotides of at least 15, more preferably at least 18, even more preferably at least 20, consecutive nucleotides. An SSR marker can be characterized by the DNA sequence of either, preferably both, of the flanking polynucleotides or the complements thereof. Such SSR-containing soybean DNA loci are more particularly characterized as being at least 90%, more preferably at least 95%, identical to the sequence of a reference polynucleotide the same number of consecutive nucleotides which are adjacent to an S SR identified in Table 1 or the complement of such reference polynucleotide. More preferably for some alleles, such SSR soybean DNA loci have a nucleic acid sequence having at least 98%, or in some cases at least 99%, sequence identity, to the sequence of the same number of nucleotides in either strand of a segment of soybean DNA which is adjacent to the SSR. The nucleotide sequence of one strand of such a segment of soybean DNA may be found in a sequence in the group consisting of SEQ ID NO: 1 through SEQ ID NO: 1531.

[0039] It is understood by the very nature of SSRs that for at least some loci there may be no SSR polymorphism, per se, between any two lines of soybean. Thus, sequence identity can be determined for sequence that is exclusive of the polymorphism sequence. Because of duplication in the soybean genome it is understood that certain SSRs can be represented at multiple loci on the same or a different linkage group; see, for instance, the loci of SEQ ID NO:228 and SEQ ID NO:297 on linkage group A2 which are duplicates of an SSR having 7 repeating units of TG. Another duplicated SSR is in the loci of SEQ ID NO: 154 and DEQ ID NO: 1403. The primer picking software selected one common primer for both loci, i.e. reverse primer of SEQ ID NO: 1839 is identical to forward primer of SEQ ID NO:4336. The other primers are different. In Table 1 the repeat unit for SEQ ID NO: 1403 is reported as CATT and for SEQ ID NO: 154 as ATGA. However, inspection of the amplicons of DEQ ID NO: 154 and SEQ ID NO: 1403 shows that the repeat units are complements with a shift in sequence.

[0040] The data associated with the SSRs-containing loci in Table enables the construction of a physical map of SSR markers in the segments of a linkage group; see, for instance, FIGS. 1 and 2. For many genotyping applications it is useful to employ as markers polymorphisms from more than one locus. Thus, one aspect of the invention provides a collection of different loci. The number of loci in such a collection can vary but will be a finite number, e.g. as few as 2 or 5 or 10 or 25 loci or more, for instance up to 40 or 75 or 100 or more loci.

[0041] Another aspect of the invention provides nucleic acid molecules which are capable of hybridizing to the polymorphic soybean loci of this invention. In certain embodiments of the invention, e.g. which provide PCR primers, such molecules comprises at least 15 nucleotide bases, more preferably between 18 and 24 nucleotide bases, generally not more than 30 nucleotide bases. Molecules useful as primers can hybridize under high stringency conditions to a one of the strands of a segment of DNA in a polymorphic locus of this invention. Primers for amplifying DNA are provided in pairs, i.e. a forward primer and a reverse primer. One primer will be complementary to one strand of DNA in the locus and the other primer will be complementary to the other strand of DNA in the locus, i.e. the sequence of a primer is preferably at least 90%, more preferably at least 95%, identical to a sequence of the same number of nucleotides in one of the strands. It is understood that such primers can hybridize to sequence in the locus which is distant from the SSR, e.g. at least 5, 10, 20, 50 or up to about 100 or more nucleotide bases away from the polymorphism. Design of a primer of this invention will depend on factors well known in the art, e.g. avoidance or repetitive sequence. Exemplary primers include the oligonucleotides of SEQ ID NO: 1532 through SEQ ID NO:4593, which are listed in Table 1 in pairs in order of the SSR markers and identified by a Seq ID corresponding to the Seq ID of the corresponding SSR marker followed by “fw” or “rv”, indicating the forward and reverse primers respectively. The sequence numbers for a primer pair for a particular SSR-containing locus, e.g. SEQ ID NO:(n), are determined as SEQ ID NO:(1531+2n−1) for the forward primer and SEQ ID NO:(1531+2n) for the reverse primer.

[0042] B. Identifying Polymorphisms

[0043] Polymorphisms in a genome can be determined by comparing cDNA sequence from different lines. While the detection of polymorphisms by comparing cDNA sequence is relatively convenient, evaluation of cDNA sequence allows no information about the position of introns in the corresponding genomic DNA. Moreover, polymorphisms in non-coding sequence cannot be identified from cDNA. This can be a disadvantage, e.g. when using cDNA-derived polymorphisms as markers for genotyping of genomic DNA. More efficient genotyping assays can be designed if the scope of polymorphisms includes those present in non-coding unique sequence.

[0044] Genomic DNA sequence is more useful than cDNA for identifying and detecting SSR polymorphisms. SSR polymorphisms in a genome can be determined by analyzing segments of genomic sequence for repetitive patterns, such as AT, TTA, AGTA, ATTT, and other patterns illustrated in Table 1. Sequence analyzing algorithms are a convenient way to identify SRR polymorphisms.

[0045] C. Detecting Polymorphisms

[0046] Polymorphisms in DNA sequences can be detected by a variety of effective methods well known in the art including those disclosed in U.S. Pat. No. 5,468,610; 5,766,847 and 6,090,558; all of which are incorporated herein by reference in their entireties. Repeat polymorphisms can be analyzed by PCR amplifying a segment containing the polymorphism and resolving the amplified segments using gel electrophoresis to differentiate SSRs of different lengths, e.g. by comparing separated individual bands on an electrophoresis gel or by autoradiography. SSRs can also be detected by mass spectroscopy methods as disclosed in U.S. Pat. No. 6,090,558; an advantages of using mass spectrometry include a dramatic increase in both the speed of analysis (a few seconds per sample) and the accuracy of direct mass measurements.

[0047] D. Use of Polymorphisms to Establish Marker/Trait Associations

[0048] The polymorphisms in the loci of this invention can be used in marker/trait associations which are inferred from statistical analysis of genotypes and phenotypes of the members of a population. These members may be individual organisms, e.g. soybean, families of closely related individuals, inbred lines, dihaploids or other groups of closely related individuals. Such soy groups are referred to as “lines”, indicating line of descent. The population may be descended from a single cross between two individuals or two lines (e.g. a mapping population) or it may consist of individuals with many lines of descent. Each individual or line is characterized by a single or average trait phenotype and by the genotypes at one or more marker loci.

[0049] Several types of statistical analysis can be used to infer marker/trait association from the phenotype/genotype data, but a basic idea is to detect markers, i.e. polymorphisms, for which alternative genotypes have significantly different average phenotypes. For example, if a given marker locus A has three alternative genotypes (AA, Aa and aa), and if those three classes of individuals have significantly different phenotypes, then one infers that locus A is associated with the trait. The significance of differences in phenotype may be tested by several types of standard statistical tests such as linear regression of marker genotypes on phenotype or analysis of variance (ANOVA). Commercially available, statistical software packages commonly used to do this type of analysis include SAS Enterprise Miner (SAS Institute Inc., Cary, N.C.) and Splus (Insightful Corporation. Cambridge, Mass.). When many markers are tested simultaneously, an adjustment such as Bonferonni correction is made in the level of significance required to declare an association.

[0050] Often the goal of an association study is not simply to detect marker/trait associations, but to estimate the location of genes affecting the trait directly (i.e. QTLs) relative to the marker locations. In a simple approach to this goal, one makes a comparison among marker loci of the magnitude of difference among alternative genotypes or the level of significance of that difference. Trait genes are inferred to be located nearest the marker(s) that have the greatest associated genotypic difference. In a more complex analysis, such as interval mapping (Lander and Botstein, Genetics 121:185-199 (1989)), each of many positions along the genetic map (say at 1 cM intervals) is tested for the likelihood that a QTL is located at that position. The genotype/phenotype data are used to calculate for each test position a LOD score (log of likelihood ratio). When the LOD score exceeds a critical threshold value, there is significant evidence for the location of a QTL at that position on the genetic map (which will fall between two particular marker loci).

[0051] a. Linkage Disequilibrium Mapping and Association Studies

[0052] Another approach to determining trait gene location is to analyze trait-marker associations in a population within which individuals differ at both trait and marker loci. Certain marker alleles may be associated with certain trait locus alleles in this population due to population genetic process such as the unique origin of mutations, founder events, random drift and population structure. This association is referred to as linkage disequilibrium. In linkage disequilibrium mapping, one compares the trait values of individuals with different genotypes at a marker locus. Typically, a significant trait difference indicates close proximity between marker locus and one or more trait loci. If the marker density is appropriately high and the linkage disequilibrium occurs only between very closely linked sites on a chromosome, the location of trait loci can be very precise.

[0053] A specific type of linkage disequilibrium mapping is known as association studies. This approach makes use of markers within candidate genes, which are genes that are thought to be functionally involved in development of the trait because of information such as biochemistry, physiology, transcriptional profiling and reverse genetic experiments in model organisms. In association studies, markers within candidate genes are tested for association with trait variation. If linkage disequilibrium in the study population is restricted to very closely linked sites (i.e. within a gene or between adjacent genes), a positive association provides nearly conclusive evidence that the candidate gene is a trait gene.

[0054] b. Positional Cloning and Transgenic Applications

[0055] Traditional linkage mapping typically localizes a trait gene to an interval between two genetic markers (referred to as flanking markers). When this interval is relatively small (say less than 1 Mb), it becomes feasible to precisely identify the trait gene by a positional cloning procedure. A high marker density is required to narrow down the interval length sufficiently. This procedure requires a library of large insert genomic clones (such as a BAC library), where the inserts are pieces (usually 100-150 kb in length) of genomic DNA from the species of interest. The library is screened by probe hybridization or PCR to identify clones that contain the flanking marker sequences. Then a series of partially overlapping clones that connects the two flanking clones (a “contig”) is built up through physical mapping procedures. These procedures include fingerprinting, STS content mapping and sequence-tagged connector methodologies. Once the physical contig is constructed and sequenced, the sequence is searched for all transcriptional units. The transcriptional unit that corresponds to the trait gene can be determined by comparing sequences between mutant and wild type strains, by additional fine-scale genetic mapping, and/or by functional testing through plant transformation. Trait genes identified in this way become leads for transgenic product development. Similarly, trait genes identified by association studies with candidate genes become leads for transgenic product development.

[0056] c. Marker-Aided Breeding and Marker-Assisted Selection

[0057] When a trait gene has been localized in the vicinity of genetic markers, those markers can be used to select for improved values of the trait without the need for phenotypic analysis at each cycle of selection. In marker aided breeding and marker-assisted selection, associations between trait genes and markers are established initially through genetic mapping analysis (as in A.1 or A.2). In the same process, one determines which marker alleles are linked to favorable trait gene alleles. Subsequently, marker alleles associated with favorable trait gene alleles are selected in the population. This procedure will improve the value of the trait provided that there is sufficiently close linkage between markers and trait genes. The degree of linkage required depends upon the number of generations of selection because, at each generation, there is opportunity for breakdown of the association through recombination.

[0058] Prediction of Crosses for New Inbred Line Development

[0059] The associations between specific marker alleles and favorable trait gene alleles also can be used to predict what types of progeny may segregate from a given cross. This prediction may allow selection of appropriate parents to generation populations from which new combinations of favorable trait gene alleles are assembled to produce a new inbred line. For example, if line A has marker alleles previously known to be associated with favorable trait alleles at loci 1, 20 and 31, while line B has marker alleles associated with favorable effects at loci 15, 27 and 29, then a new line could be developed by crossing A×B and selecting progeny that have favorable alleles at all 6 trait loci.

[0060] E. Use of Polymorphism Assay for Mapping a Library of DNA Clones

[0061] The polymorphisms and loci of this invention are useful for identifying and mapping DNA sequence of QTLs and genes linked to the polymorphisms. For instance, BAC or YAC clone libraries can be queried using polymorphisms linked to a trait to find a clone containing specific QTLs and genes associated with the trait. For instance, QTLs and genes in a plurality, e.g. hundreds or thousands, of large, multi-gene sequences can be identified by PCR amplification with oligonucleotide primers which anneal to a mapped and/or linked polymorphism. Such PCR screening can be improved by providing clone sequence in a high density array. The screening method is more preferably enhanced by employing a pooling strategy to significantly reduce the number of PCR reactions required to identify a clone containing the polymorphism. When the polymorphisms are mapped, the screening effectively maps the clones.

[0062] For instance, in a case where thousands of clones are arranged in a defined array, e.g. in 96 well plates, the plates can be arbitrarily arranged in three-dimensionally, arrayed stacks of wells each comprising a unique DNA clone. The wells in each stack can be represented as discrete elements in a three dimensional array of rows, columns and plates. In one aspect of the invention the number of stacks and plates in a stack are about equal to minimize the number of assays. The stacks of plates allow the construction of pools of cloned DNA.

[0063] For a three-dimensionally arrayed stack pools of cloned DNA can be created for (a) all of the elements in each row, (b) all of the elements of each column, and (c) all of the elements of each plate. PCR screening of the pools with an oligonucleotide primer which anneals to an SSR locus unique to one of the clones will provide a positive indication for one column pool, one row pool and one plate pool, thereby indicating the well element containing the target clone.

[0064] In the case of multiple stacks, additional pools of all of the clone DNA in each stack allows indication of the stack having the row-column-plate coordinates of the target clone. For instance, a 4608 clone set can be disposed in 48 96-well plates. The 48 plates can be arranged in 8 sets of 6 plate stacks providing 6×12×8 three-dimensional arrays of elements, i.e. each stack comprises 6 stacks of 8 rows and 12 columns. For the entire clone set there are 36 pools, i.e. 6 stack pools, 8 row pools, 12 column pools and 8 stack pools. Thus, a maximum of 36 PCR reactions is required to find the clone harboring QTLs or genes associated or linked to each mapped polymorphism.

[0065] Once a clone is identified, oligonucleotide primers designed from the locus of the SSR can be used for positional cloning of the linked QTL and/or genes.

[0066] F. Computer Readable Media and Databases

[0067] The sequences of nucleic acid molecules of this invention can be “provided” in a variety of mediums to facilitate use, e.g. a database or computer readable medium, which can also contain descriptive annotations in a form that allows a skilled artisan to examine or query the sequences and obtain useful information. In one embodiment of the invention computer readable media may be prepared that comprise nucleic acid sequences where at least 10% or more, e.g. at least 25%, or even at least 50% or more of the sequences of the loci and nucleic acid molecules of this invention. For instance, such database or computer readable medium may comprise sets of the loci of this invention or sets of primers and probes useful for assaying the polymorphisms of this invention. In addition such database or computer readable medium may comprise a figure or table of the mapped or unmapped polymorphisms or this invention and genetic maps.

[0068] As used herein “database” refers to any representation of retrievable collected data including computer files such as text files, database files, spreadsheet files and image files, printed tabulations and graphical representations and combinations of digital and image data collections. In a preferred aspect of the invention, “database” means a memory system that can store computer searchable information. Currently, preferred database applications include those provided by DB2, Sybase and Oracle.

[0069] As used herein, “computer readable media” refers to any medium that can be read and accessed directly by a computer. Such media include, but are not limited to: magnetic storage media, such as floppy discs, hard disc, storage medium and magnetic tape; optical storage media such as CD-ROM; electrical storage media such as RAM and ROM; and hybrids of these categories such as magnetic/optical storage media. A skilled artisan can readily appreciate how any of the presently known computer readable mediums can be used to create a manufacture comprising computer readable medium having recorded thereon a nucleotide sequence of the present invention.

[0070] As used herein, “recorded” refers to the result of a process for storing information in a retrievable database or computer readable medium. For instance, a skilled artisan can readily adopt any of the presently known methods for recording information on computer readable medium to generate media comprising the mapped polymorphisms and other nucleotide sequence information of the present invention. A variety of data storage structures are available to a skilled artisan for creating a computer readable medium where the choice of the data storage structure will generally be based on the means chosen to access the stored information. In addition, a variety of data processor programs and formats can be used to store the polymorphisms and nucleotide sequence information of the present invention on computer readable medium.

[0071] Computer software is publicly available which allows a skilled artisan to access sequence information provided in a computer readable medium. The examples which follow demonstrate how software which implements a search algorithm such as the BLAST algorithm (Altschul et al., J. Mol. Biol. 215:403-410 (1990), incorporated herein by reference) and the BLAZE algorithm (Brutlag et al., Comp. Chem. 17:203-207 (1993), incorporated herein by reference) on a Sybase system can be used to identify DNA sequence which is homologous to the sequence of loci of this invention with a high level of identity. Sequence of high identity can be compared to find polymorphic markers useful with a maize varieties.

[0072] The present invention further provides systems, particularly computer-based systems, which contain the sequence information described herein. Such systems are designed to identify commercially important sequence segments of the nucleic acid molecules of this invention. As used herein, “a computer-based system” refers to the hardware, software and memory used to analyze the nucleotide sequence information. A skilled artisan can readily appreciate that any one of the currently available computer-based system are suitable for use in the present invention.

[0073] As indicated above, the computer-based systems of the present invention comprise a database having stored therein polymorphic markers, genetic maps, and/or the sequence of nucleic acid molecules of the present invention and the necessary hardware and software for supporting and implementing genotyping applications.

### EXAMPLE 1

[0074] This example illustrates the determination of soybean genomic DNA sequence from BAC clones of the soybean line A3244. Two basic methods can be used for DNA sequencing, the chain termination method of Sanger et al., Proc. Natl. Acad. Sci. USA 74:5463-5467 (1977) and the chemical degradation method of Maxam and Gilbert, Proc. Natl. Acad. Sci. USA 74:560-564 (1977). Automation and advances in technology such as the replacement of radioisotopes with fluorescence-based sequencing have reduced the effort required to sequence DNA (Craxton, Methods, 2:20-26 (1991), Ju et al., Proc. Natl. Acad. Sci. USA 92:4347-4351 (1995) and Tabor and Richardson, Proc. Natl. Acad. Sci. USA 92:6339-6343 (1995). Automated sequencers are available from, for example, Applied Biosystems, Foster City, Calif. (ABI Prism® systems); Pharmacia Biotech, Inc., Piscataway, N.J. (Pharmacia ALF), LI-COR, Inc., Lincoln, Nebr. (LI-COR 4,000) and Millipore, Bedford, Mass. (Millipore BaseStation).

[0075] In addition, advances in capillary gel electrophoresis have also reduced the effort required to sequence DNA and such advances provide a rapid high resolution approach for sequencing DNA samples (Swerdlow and Gesteland, Nucleic Acids Res. 18:1415-1419 (1990); Smith, Nature 349:812-813 (1991); Luckey et al., Methods Enzymol. 218:154-172 (1993); Lu et al., J. Chromatog. A. 680:497-501 (1994); Carson et al., Anal. Chem. 65:3219-3226 (1993); Huang et al., Anal. Chem. 64:2149-2154 (1992); Kheterpal et al., Electrophoresis 17:1852-1859 (1996); Quesada and Zhang, Electrophoresis 17:1841-1851 (1996); Baba, Yakugaku Zasshi 117:265-281 (1997).

[0076] A number of sequencing techniques are known in the art, including fluorescence-based sequencing methodologies. These methods have the detection, automation and instrumentation capability necessary for the analysis of large volumes of sequence data. An ABI Prism®377 DNA Sequencer (Applied Biosystems, Foster City, Calif.) allows rapid electrophoresis and data collection. With these types of automated systems, fluorescent dye-labeled sequence reaction products are detected and data entered directly into the computer, producing a chromatogram that is subsequently viewed, stored, and analyzed using the corresponding software programs. These methods are known to those of skill in the art and have been described and reviewed (Birren et al., Genome Analysis: Analyzing DNA,1, Cold Spring Harbor, N.Y. (1999).

[0077] Sequence base calling from trace files and quality scores are assigned by PHRED which is available from CodonCode Corporation, Dedham, Mass. and is described by Brent Ewing, et al. “Base-calling of automated sequencer traces using phred”, 1998, Genome Research, Vol. 8, pages 175-185 and 186-194, incorporated herein by reference.

[0078] After the base calling is completed, sequence quality is improved by cutting poor quality end sequence. If the resulting sequence is less than 50 bp, it is deleted. Sequence with an overall quality of less than 12.5 is deleted. And, contaminating sequence, e.g. E. coli BAC and vector sequences and sub-cloning vector, are removed. Contigs are assembled using Pangea Clustering and Alignment Tools which is available from DoubleTwist Inc., Oakland, Calif. by comparing pairs of sequences for overlapping bases. The overlap is determined using the following high stringency parameters: word size=8; window size=60; and identity is 93%. The clusters are reassembled using PHRAP fragment assembly program which is available from CodonCode Corporation using a “repeat stringency” parameter of 0.5 or lower. The final assembly output contains a collection of sequences including contig sequences which represent the consensus sequence of overlapping clustered sequences (contigs) and singleton sequences which are not present in any cluster of related sequences (singletons). Collectively, the contigs and singletons resulting from a DNA assembly are referred to as islands.

### EXAMPLE 2

[0079] This example illustrates SSRs which have been identified by searching for repeat segments of sequences in the contigs and singletons of genomic sequence of the soybean line A3244 as prepared as in Example 1. A plurality of loci having SSRs are reported as SEQ ID NO: 1 through SEQ ID NO: 1531 and identified more particularly in Table 1 which identifies the repeat unit and physical mapping distance between SSRs in soybean line A3244. The style of Table 1 is illustrated by reference to the following Abbreviated Table 1

Abbreviated Table 1

| | | | | Dis- |
|---|---|---|---|---|
| | | | | tance |
| | | | | from |
| | | | | Prev- |
| Seq | | Repeat | Repeat | ious |
| Num | Seq ID | Unit | Times | Marker |
| 1 | 240G09_region_A2_1_164_14 | TCG | 5 | _{—} |
| 2 | 240G09_region_A2_1_1076_51 | AT | 26 | 912 |
| 3 | 240G09_region_A2_1_3791_12 | TTC | 4 | 2715 |
| 1531 | 344J16_region_M_1_8102_14 | AATA | 4 | 2245 |
| 1532 | 240G09_region_A2_1_164_14_{—} | | | |
| | fw | | | |
| 1533 | 240G09_region_A2_1_164_14_{—} | | | |
| | rv | | | |
| 4592 | 344J16_region_M_1_8102_14_{—} | | | |
| | fw | | | |
| 4593 | 344J16_region_M_1_8102_14_{—} | | | |
| | rv | | | |

[0080] The information in Table 1 serves to identify the SSR-containing loci and primers where

[0081] “Seq Num” is SEQ ID NO. for the sequence listing.

[0082] “Seq Id” is a name which provides mapping data. For instance, for SEQ ID NO:2, the elements of the Seq Id are “240G09_region_A2_{—}1_{—}1076_{—}51” where “240G09” is an arbitrary contig name, “region_A2” indicates that the SSR is in linkage group A2, the numeral “1” indicates the sequential order of the contigs in the region, the numeral “1076” indicates that the starting nucleotide base in the contig for the SSR, and the numeral “51” indicates the nucleotide length of the SSR. For the primers of SEQ ID NO: 1532 through SEQ ID NO:4593 the Seq Id corresponds to the Seq Id of the cognate locus followed by “fw” or “rv” for the forward or reverse primer, respectively, for amplifying a locus.

[0083] “Repeat Unit”, “Repeat Times” and “Distance from Previous Marker” describe the SSR and its physical location. For SEQ ID NO:2, the repeat unit is AT, repeated 26 times and beginning 912 bases from the start of the previous SSR in the contig.

[0084] There is some discrepancy in numeration of markers because the marker selecting software adds common bases which may not fit in a complete repeat unit. A further peculiarity of the marker selecting software is an inability to recognize SNPs in an SSR. For example see the marker of SEQ ID NO: 24, which to the eye is an ATATT repeat unit; but a SNP causes the repeat unit to be stated as “ATATTATATTATACTATATTA”. Known public SSR markers included in the SSRs are identified in Table 2.

### EXAMPLE 3

[0085] This example serves to illustrate mapping of the SSRs. Table 2 identifies a number of public SSR markers within the SSRs of Table 1 which are in linkage groups A2 and G. The location of these public SSR markers serves to locate the SSRs within regions of linkage groups A2 and G on genetic maps as illustrated in FIGS. 1 and 2.

[0086] No public SSR markers were identified as being within the SSR-containing regions of linkage groups M, A1 and H. However, an SSR of each of the regions of linkage groups M, A1 and H was mapped to adjacent public markers. Reference is made to the distance to adjacent public markers as described in Table 3.

TABLE 2

| Linkage Group | SSR SEQ ID NO: | Public Marker |
|---|---|---|
| A2 | 8 | Satt315 |
| A2 | 58 | Satt632 |
| A2 | 182 | Sat_162 |
| A2 | 472 | Satt424 |
| G | 560 | Satt275 |
| G | 658 | Satt163 |
| G | 798 | Sat_168 |
| G | 819 | Satt309 |
| G | 1063 | Sat_141 |
| G | 1065 | Sat_163 |
| G | 1181 | Satt610 |
| G | 1249 | Satt570 |
| G | 1303 | Satt235 |

[0087] TABLE 3

| | | Distance to |
|---|---|---|
| Linkage Group | Marker | next marker |
| M | SEQ ID NO: 1531 | 5.0 cm |
| | Satt636 | 6.2 |
| | Satt201 | 4.9 |
| | Sat_316 | — |
| A1 | Satt619 | 11.1 cm |
| | SEQ ID NO: 1403 | 22.3 |
| | Satt155 | — |
| H | Satt353 | 16.7 cm |
| | SEQ ID NO: 1476 | 14.9 |
| | SATT442 | — |

### EXAMPLE 4

[0088] This example illustrates the use of SSR markers in soybean QTL or gene association. The markers of this invention are useful in genotyping soybean lines for QTLs associated with soybean cyst nematode (SCN) resistance or susceptibility. SCN is a destructive pest of soybean resulting in high yield loss. Currently, the most cost effective control measures are crop rotation and the use of host plant resistance. While breeders have successfully developed SCN resistant soybean lines, breeding is both difficult and time consuming due to the complex and polygenic nature of resistance. The resistance is often race specific and does not provide stability over time due to changing SCN populations in the field. In addition, many of the resistant soybean varieties carry a significant yield penalty when grown in the absence of SCN.

[0089] Matson and Williams (Crop Sci. 5:447 (1965)) have reported a dominant SCN resistance locus, Rhg4, which is tightly linked to the ‘i’ locus on linkage group A2. In U.S. Pat. No. 5,491,081, incorporated herein by reference, Webb reports on the analysis of 328 recombinant inbreed lines (RIL) derived from a cross between soybean lines PI437654 and BSR101. Webb reported six QTLs associated with SCN resistance on linkage groups A2, C1, G, M, L25 and L26 and that the QTLs on linkage groups A2, C1, M, L25 and L26 act in a race specific manner. The QTL reported by Webb on linkage group A2 maps near the ‘i’ locus and is considered to be Rhg4 (U.S. Pat. No. 5,491,081). Webb concludes that only two loci on linkage groups A2 (Rhg4) and G (rhg1) explain the genetic variation to race 3.

[0090] Any soybean plant having an Rhg4 SCN resistant allele can be used in conjunction with the present invention. Soybeans with known Rhg4 SCN resistant alleles can be used. Such soybeans include, but are not limited to, PI548402 (Peking), PI437654 (Er-hej-jan), PI1438489 (Chiquita), PI507354 (Tokei 421), PI548655 (Forrest), PI548988 (Pickett), PI88788, PI404198 (Sun Huan Do), PI404166 (Krasnoaarmejkaja), Hartwig, Manokin, Doles, Dyer, and Custer. In a preferred aspect, the soybean plant having an Rhg4 SCN resistant allele is an Rhg4 haplotype 3 allele in a plant having either an rhg1 haplotype 2 or rhg1 haplotype 4 allele. Examples of soybeans with an Rhg4 haplotype 3 allele are PI548402 (Peking), PI88788, PI404198 (Sun huan do), PI438489 (Chiquita), PI437654 (Er-hejjan), PI404166 (Krasnoaarmejkaja), PI548655 (Forrest), PI548988 (Pickett), and PI507354 (Tokei 421). In addition, using the methods or agents of the present invention, soybeans and wild relatives of soybeans such as Glycine soja can be screened for the presence of Rhg4 SCN resistant alleles.

[0091] Table 4 below is a table showing single nucleotide polymorphisms (SNPs) for three haplotype sequences of Rhg4.

TABLE 4

| Identification | | | Phenotypes | | SSR Marker (SEQ ID NO:) | | |
|---|---|---|---|---|---|---|---|
| Hap | PI number | Line | SCN | Coat | 177 | 175 | 192 |
| 1 | — | A2069 | R | Yellow | 2 | 2 | 2 |
| 1 | — | A2869 | R | Yellow | 2 | 2 | 2 |
| 1 | — | A3244 | S | Yellow | 2 | 2 | 2 |
| 1 | PI87631 | Kindaizu | R | Yellow | 2 | 2 | 2 |
| 1 | PI548389 | Minsoy | S | Yellow | 2 | 2 | 2 |
| 1 | PI518664 | Hutcheson | S | Yellow | 2 | 2 | 2 |
| 1 | PI548658 | Lee 74 | S | Yellow | — | 2 | 2 |
| 2 | PI540556 | Jack | R | Yellow | 2 | 2 | 1 |
| 2 | PI360843 | Oshimashirome | R | yellow | — | — | — |
| 2 | PI423871 | Toyosuzu | R | yellow | — | — | — |
| 3 | PI548402 | Peking | R | black | 1 | 1 | 1 |
| 3 | PI88788 | — | R | black | 1 | 1 | 1 |
| 3 | PI404198 B | (Sun huan do) | R | black | 1 | 1 | 1 |
| 3 | PI438489 B | (Chiquita) | R | black | 1 | 1 | 1 |
| 3 | PI437654 | Er-hej-jan | R | black | 2 | 1 | 1 |
| 3 | PI404166 | Krasnoaarmejkaja | R | black | 1 | 1 | — |
| 3 | PI290136 | Noir | S | black | 1 | 1 | 1 |
| 3 | PI548655 | Forrest | R | yellow | 1 | 1 | 1 |
| 3 | PI548988 | Pickett | R | yellow | 1 | 1 | 1 |
| 3 | PI507354 | Tokei 421 | R | yellow | 1 | 1 | 1 |
| N/A | PI467312 | Cha-mo-shi-dou | R | GnBr | 1 | 1 | 1 |
| N/A | PI209332 | No. 4 | R | black | 2 | 2 | 2 |
| N/A | PI518672 | Will | S | yellow | 2 | 2 | 2 |
| N/A | PI548667 | Essex | S | yellow | 2 | 2 | 2 |

[0092] In Table 4, discrete haplotypes are designated 1 through 3. N/A refers to a haplotype that is not characterized. In Table 4, the Plant Introduction classification number is indicated in the “PI#” column. A dash indicates that no PI number is known or assigned for the line under investigation. The line from which the sequences are derived is indicated in the “line” column, with a dash indicating an unknown or unnamed line. The “Phenotypes.” columns of Table 4 indicate “SCN” resistance (R) to at least one race of SCN, or sensitivity (S) and “coat” color of a seed as either yellow, black, green/brown (GnBr), or unknown/unassigned (dash). At the I locus, black seeded varieties harbor the i allele for black or imperfect black seed coat; commercially preferred embodiments have a yellow coat. Three different SSR markers that occur within the loci of SEQ ID NOs: 175, 177 and 192 are listed under “SSR markers.” The allele of each marker occurring in a haplotype is indicated by a 1 or a 2, with a dash indicating that the information is not determined.

### EXAMPLE 5

[0093] This example illustrates the mapping of SSR markers. The genetic linkage of marker molecules of the present invention can be established on soybean linkage group A2 by a gene mapping model such as, without limitation, the flanking marker model reported by Lander and Botstein, Genetics, 121:185-199 (1989), and the interval mapping, based on maximum likelihood methods described by Lander and Botstein, Genetics, 121:185-199 (1989), and implemented in the software package MAPMAKER/QTL (Lincoln and Lander, Mapping Genes Controlling Quantitative Traits Using MAPMAKER/QTL, Whitehead Institute for Biomedical Research, Cambridge, Mass., (1990). Additional software includes Qgene, Version 2.23 (1996), Department of Plant Breeding and Biometry, 266 Emerson Hall, Cornell University, Ithaca, N.Y. Use of Qgenc software is one approach. The genetic linkage of SSR markers on linkage group A2 to the yield locus Sy5 are shown in Table 5. Soybean gene sequences found on linkage group A2 to be in genetic linkage with the Sy5 locus comprise the S-adenosyl-L-homocystein hydrolase (SAHH) gene, xyloglucan endotransglycosylase (XET1) gene, and the clhalcone synthase gene cluster.

TABLE 5

| | |
|---|---|
| Markers | Distance |
| Satt315 | 6.9 cM |
| SSR SEQ ID NO: 99 (Sy36) | 0.6 cM |
| XET1 gene | 0.3 cM |
| SSR SEQ ID NO: 203 | 0.1 cM |
| (SCNB187) | |
| SAHH gene | 0.1 cM |
| SSR SEQ ID NO: 228 | 0.1 cM |
| (SCNB188) | |
| SSR SEQ ID NO:253 | 0.1 cM |
| (SCNB190) | |
| SSR SEQ ID NO: 272 (Sy50) | 0.0 cM |
| Seed coat color | 1.1 cM |
| Sat_212 | 0.4 cM |
| Satt187 | 0.1 cM |
| Sat_215 | — |

### EXAMPLE 6

[0094] This example illustrates in more detail the use of markers of this invention in marker assisted breeding for the Sy5 yield QTL on soybean linkage group A2. DNA is extracted from healthy leaf of a young soybean plant. Aliquots of the DNA are PCR amplified using primer pairs of each of the following SSR-containing loci: SEQ ID NO: 99, SEQ ID NO:203, SEQ ID NO:228, SEQ ID NO:253 and SEQ ID NO: 272. Primers for the SSR markers are defined in Table 1. The PCR reaction products are scored by electrophoresis for the presence or absence of the bands on the appropriate molecular weights of SSR markers spanning the Sy5 yield QTL.

### EXAMPLE 7

[0095] This example illustrates the use of markers of this invention in breeding for a QTL. To facilitate the use of this exotic locus in improving yield of commercial cultivars the following procedure can be used. Briefly, a cross can be made with any of the progenies derived from the above described plants and derivatives thereof carrying an exotic locus with any potential cultivar that one wishes to improve. Using marker analysis a breeder can monitor the positive transfer of the exotic locus by checking the presence of the molecular marker band corresponding to markers associated with the exotic locus, i.e. the amplicon resulting from PCR amplification of DNA using marker primers. Then a series of backcrosses (up to BC₅) to the commercial cultivar (recurrent parent) can be made to recover most of the agronomic properties of the recurrent parent. Prior to each backcross step, the positive transfer of the exotic alleles has to be validated among backcross-derived progenies (BCnFn) (where n=generation) using molecular marker analysis as previously described. The number of backcrosses depends on the level of recurrent parent recovery which can also be facilitated by the use of markers evenly distributed throughout the genome.

[0096] Glycine max PI290136 having the desirable Sy5 yield locus and undesirable black seed coat trait is used as a donor parent (D) for crossing with elite soybean line H5050 (Hartz Seed, Stuttgart, Ark.) having the desirable yellow seed coat trait as the acceptor parent (A) following a protocol for isoline development for breaking linkage between Sy5 locus and black seed color. The elite, yellow seed coat line is crossed to a black seed coat donor parent carrying Sy5 QTL, producing F₁ plants which are heterozygous throughout the Sy5 region. The F₁ plants are back crossed producing BC₁F₁ plants which segregate at a 1:1 ratio for elite A line and donor parent alleles. The BC₁F₁ plants are genotyped with 2 SSR markers flanking Sy5 (e.g. SSR SEQ ID Nos: 99 and 272). Individuals that are heterozygous for both flanking markers and the black seed coat donor are selected. BC₂F₁ plants segregate 1:1 in the Sy5 region because all BC₁F₁ parents are heterozygous. The BC₂F₁ plants are genotyped with the same 2 SSR markers flanking Sy5 that are used in the BC₁F₁ to identify individuals that are heterozygous for both flanking markers. BC₂F₂ plants are genotyped with four SSR markers in the Sy5 region to identify plants which are heterozygous at all four marker loci. Self pollinated seed is harvested in bulk from the heterozygotes. The BC₂F₃ generation will segregate in a 1:2:1 ratio at the I locus (II:Ii:ii). Seed harvested from yellow plants, (II and li), segregates in a 1:2 ratio (II:Ii). F₃:₄ lines are planted from seed derived from yellow seed coat parents. Nonsegregating rows for seed color which arose from homozygous yellow parents are identified. Yellow seed coat parents segregate at 2:1 (Ii:II), hence, 1/3 of BC₂F₃.₄ rows will be uniformly yellow seed coat. BC₂F₃ plants are genotyped using flanking SSR markers. Desired BC₂F₃ plants carry one parental gamete throughout the Sy5 region and one recombinant gamete. BC₂F₃:₄ lines are desired that arose from BC₂F₃ individuals that are homozygous yellow seed coat and contain one parental gamete and one recombinant gamete close to the I locus. Homozygous yellow BC₂F₃ individuals are the result of randomly sampling two gametes.

[0097] Pollen from the F₁ progeny of that cross are then crossed back to the parent line to generate about 40 BC₁F₁ progeny. Each BC₁F₁ progeny is then grown and crossed again to the parent line to generate between 250 and 300 BC₂F₁ progeny. The BC₂F₁ progeny are grown and leaf samples are taken from each plant for subsequent DNA extraction and molecular marker genotyping. The BC₂F₁ plants are grown to maturity and genotyped with the molecular markers flanking the Sy5 locus. Nine BC₂F₁ heterozygote lines for both flanking markers are identified. The BC₂F₂ seeds are collected from each BC₂F₁ plant then bulked. The resulting seeds from each of BC₂F₁-derived progeny are used for yield field trials.

[0098] The yield field trial plots are laid out in a random split block design with a single replication, where blocks represent early, mid and late maturity groups to facilitate harvest. There are two-row 16-ft. plots, with the adapted parent, as a border row on each side. Seeding rate is eight seeds per foot. Cultural practices such as herbicide applications and fertilization are carried out following the recommendations for soybean. At harvest, only the test rows are harvested and seed yield is adjusted to 13% moisture content to get the dry yield for each line using the formula: Dry yield=Actual yield×(1-% moisture at harvest)/(1-0.13). Seed yield per plot is converted into yield in bushels per acre using the formula: Plot size/Acre=lb/Acre. For example, yield measured in lbs. from a 16-ft×5 ft plot is converted to bushels per acre by multiplying it with a factor of 9.075. In all cases, the average percent yield increase of the plants carrying the Sy5 yield QTL derived from PI290136 is statistically significant (Analysis of Variance) higher than that of the plants homozygous for the adapted alleles (Table 6).

TABLE 6

| Genotype | Mean (bu/Ac)¹ |
|---|---|
| | First year |
| Homozygous Sy5 QTL | 54.35 |
| Heterozygous Sy5 QTL | 53.47 |
| Sy5 QTL negative | 44.23 |
| | Second year |
| Homozygous Sy5 QTL | 38.25 |
| Heterozygous Sy5 QTL | 41.30 |
| Sy5 QTL negative | 31.69 |

¹Yield is measured as dry seed weight in bushels per acre.

The application's sequence listing, which the Patent Office published only in electronic form, follows.

SEQUENCE LISTING (4593 sequences)

SEQ ID NO: 1 - DNA, 100 bp, Glycine max
agccctctccgacaagtacggccacgtcatttccctatggtttggctcccgcctcgtcgtcgtcgtctcctcccaaaccttattccaagaatgcttcacc

SEQ ID NO: 2 - DNA, 284 bp, Glycine max
aaggccttgctttggtatatatttttagtttataactgtttcctaccaaccttttcttttgtttcatatcatatatgattttaagttatattatacctataactattttatttagtttttcttaccacaattatattatttacttatgaataatatatatatatatatatatatatatatatatatatatatatatatatataatatcatttaaaatcattataaataataaatttattgatttttataataagagaaatattaaccacacatctttctgatgt

SEQ ID NO: 3 - DNA, 114 bp, Glycine max
ccggccataacaataagaacatactaaaatttcaatcaaaagaaatgtttattttaccacatcatctaccaagaatccttttcttcttcttcctcaattaattcctctctgttt

SEQ ID NO: 4 - DNA, 81 bp, Glycine max
tgcacaatattcatttcgtttactcctacgtctctctctctatataagatctttttaactaagttgattcatcgttgaaca

SEQ ID NO: 5 - DNA, 202 bp, Glycine max
tcaaaccattcaagtttcactaaagttgttgtcatttgcaaatataataagaatgataatggaatatatatatatatatatatatatatatatatatatatatatatatatatatatatatatatatatatatatataaaattataattataatgtaaaaaaaactattcgtaaatataaaatgaatgcataataatcatct

SEQ ID NO: 6 - DNA, 199 bp, Glycine max
gaaatgtacgtgtgccaaaaattccttcttttaatattataaaagatatatatatatatatatatatatatatatatatatatattatagttaagtaatagaattgaattaatagattttcagaaatcactataaaatataaaaaattaaaataaatggttagtgatatgacaagtcaaacaaacatataaatgcggcc

SEQ ID NO: 7 - DNA, 194 bp, Glycine max
atataaatgcggccaatgaaatgttaatggaaaaattagattatgcaggtaataaataaaaatatttctaaataataaattaaaaaatttatacgacaactctaatgaaaatctttattattattattattattattattattattattattcacaaagttcccttaaaaaatctttagtaagacacatgcatt

SEQ ID NO: 8 - DNA, 229 bp, Glycine max
ttcacaaagttcccttaaaaaatctttagtaagacacatgcattaattatatgacaataaaaaaaaaaagaattcaaatgtttcaaaatgaaaaatcattaattcacttttatgtcaattattattattattattattacattaattactttgaattgacttttgaaaaatcaaactcaaaatttattattgtcccttcatgtttttgtttaaattcagcccaatcgtt

SEQ ID NO: 9 - DNA, 161 bp, Glycine max
tggtgttagacaataacaaatgaaactaatacattttctttaagagagaaatataaaattaaattaaattataaatataaaattaatattttaaaaataatatgtaagtcaataaaaataattataaaaaatatgataaattcctttcaaatttatccaaa

SEQ ID NO: 10 - DNA, 130 bp, Glycine max
ttcaagtatcccaatgacaagttttttaagcttcaatctataataaaagagatttatttagttataatattttttatctaaaatatcattattattattatttatatgtaagaatcaaattaggagattt

SEQ ID NO: 11 - DNA, 172 bp, Glycine max
cggcagttcattagaaacagagagtattttataatttttgtagtcaataaatagtaaatactattaatgaacataaattcattctttttcttctatgtatatatcaaggaaaattactaacacacattaataattaattaattaggtaaaaaaagtgagatgatgagatcca

SEQ ID NO: 12 - DNA, 178 bp, Glycine max
gatgtcttacgaggtgatgtctaataacaaatccatcaattaattagattaaattaataattttcataattgatatatatatatatatataataattaaaaaatattttataattaattaatccaaatctacaaataaataatacaattattttttgtaaatatcttgcaagcagatg

SEQ ID NO: 13 - DNA, 85 bp, Glycine max
gcatcaattaacccaccatgttttgtactatatgatatatgatcgacaagaaagaaagaaaaaagtgatgcagtatgttactctt

SEQ ID NO: 14 - DNA, 166 bp, Glycine max
ttgggtttagcaatcttcctcctgaggtatcatatgaagaagaagaaggaagtggtagatccgtatttaccccattgttttccaaaagtgcatacactctctcatactgaaaaataattcataaaatattgtcaattaaaaacgaatgaatcattgatgtgggtgt

SEQ ID NO: 15 - DNA, 179 bp, Glycine max
caaatcttgcgtaaatatgaaagttaaaaatatattatcataacaaattatttgaattttttatcataacttttaatgaaatatactatctcaaagcgtttaggtaaaataaaataaatactttcatatttaataatccccaaatacaaagttattaattacgatgcaaacacttcaaa

SEQ ID NO: 16 - DNA, 251 bp, Glycine max
tttcacaataatgtttagagaatatatatttagaaattagaaaagagtcttataaaatattcaaataaatttatgaaaaaagatcttataattataaatggaggaaatatttctaacaatttttttaatgtaatattaataatgatgtcagttttgtaaaattattattatttatttatttattaatttttctttatctatgtaaaatagcattggataatacttttttgggataaagagagtactatatt

SEQ ID NO: 17 - DNA, 204 bp, Glycine max
aggacaagaaagcaacgatcaaattaatttgaagaattgaagaaaaacatgtaacttaaaggcaattaaaagaaaattataaatgtaaatgaagctaaaagtggctataggagtagttattattttcttgttatttctcttttatgatttcaattagttagttcctctgtatgtgtgtgtgtacacacagacattcatttcagt

SEQ ID NO: 18 - DNA, 82 bp, Glycine max
ggtaatgtggtggtgacaaattttaaaatgagactttattttattttaaaatgcataatttattgtaaagcaactcctcaaa

SEQ ID NO: 19 - DNA, 170 bp, Glycine max
ttgtaaagcaactcctcaaaatctgtaagtactaatatacccccaccccaaattaaatgaaagaaagaaagaaagaaaaagagttgtacgtacttgaattctttttttttttttcttttgagaaagggaaaattaatagactattggtaagtagtggtggagaattgtgg

SEQ ID NO: 20 - DNA, 91 bp, Glycine max
ttccacagcatcttggtttgaacatgggaaactcctacatcaacaacaacaacaacatggataatcatttggtgcaagaggtcattgatgc

SEQ ID NO: 21 - DNA, 180 bp, Glycine max
gtgcttgtgctccaaatcaatgcaaaaacatctctatgaagcgctaaaagtagggaaactgtattgaaatgctaaaaccacgaaaataaaatgaaatgaaattgaaaacaaattaaaggaatcagtttaggttttttaattttctctctcttaagagtatcatcttggcgagtagaggaa

SEQ ID NO: 22 - DNA, 98 bp, Glycine max
aacattgcttatatttctccttcttaacagaaactaaagaaagaaagaaagaaagaaagaaaaatgcctcttcatgacaacatcaagtggcaccaaat

SEQ ID NO: 23 - DNA, 145 bp, Glycine max
tgtagtggcgacaacgatgatgatgttaacaacaacaacaatggtgacaaagatatcaataatagttacaatgacgataataatgacaatgatggtgacaataacaatagtggaatggtgatagtagtgatgaccaggacggtac

SEQ ID NO: 24 - DNA, 120 bp, Glycine max
tttgttgatatgacaaccattcttttcatatctgaggcttctacagtaatattatattatactatattacaatttagaacagacagatagggagacaagattctcaaagctgaaccaatt

SEQ ID NO: 25 - DNA, 117 bp, Glycine max
gccagtgttgaacctgaagagaaaaaatgaatcacaaaaaagagatgtacaaaattatgaaactacacaaaaataataataataataataataatcctgcaaatgccagccaacaga

SEQ ID NO: 26 - DNA, 120 bp, Glycine max
ttcaaagaatgtaaactcaaggcaaaataaaataaaatgtaaatctgagtgaagtacatgacaacatcttttaattaatgacattacattttctttattggcaaagaagcaagcaaccct

SEQ ID NO: 27 - DNA, 258 bp, Glycine max
aaacaatcgatccacacatatatattaactacaattgattttatcaattcttattataaaataattttatttaattaaaatacctttataactacatgtgttatacagttatacatttattaatgcatttatttatttattgaggaatataacagtttggaataatatataaaatgtctaaattaatatcactgttgattcgaaattaatctcatgaatgtgtagtagcagaagatatgacaagatcccacaatcgaa

SEQ ID NO: 28 - DNA, 125 bp, Glycine max
ttcatcggaatcacttgccttttatttctctttctttctcacccaacaaaagatgccaagagagagatatatatgaactcattaattaattaattatcttttattcgactgaaattgatcttaga

SEQ ID NO: 29 - DNA, 149 bp, Glycine max
ctttgtcccttgtttccacttaaactaagcaaacacaaaaataaccttacatatatatatatatatatatatatatatatatatatggaaggttttcacccttctatgacctctcctttttcgtacacattccctatcagtgatgctgg

SEQ ID NO: 30 - DNA, 100 bp, Glycine max
ccacaccaacactggttcttgttcttcaagcaccacaagacccgcaagagctacatctacaaaaacaacaacaacaacaacgggagtagcgatggttgtg

SEQ ID NO: 31 - DNA, 128 bp, Glycine max
aagaaattgttcctcaatcgttttatatacagtgacatcaatgcaatagtactatttctctctctctctccatatatatactcatttttttctatattttttttttctgaaagtatacaagggtccaa

SEQ ID NO: 32 - DNA, 154 bp, Glycine max
ggcgttgttatggtcaagtcaatcatttttttttttaccagagtgagatgatatgcattcacaaaataaaataaaataagaagagaaatattgatgatatgtatttaatggttacaggttacagtgacattggtccaatgaggtgggttggatt

SEQ ID NO: 33 - DNA, 497 bp, Glycine max
atgaggtgggttggattttccgtcatcaggcccaaggcctcttttgagcaatgacactttattttaatatatatttaatacacataattttacataataaaattttataataataaaattttataataattagtttttatataataatgtattttttttacatataacactaaaatttaaaatttatagatgtaaaaaaatacattattagaactaaattttttaatatatatttaatttacctatataaatttttattaaacctataatttttatttaaaatttatatatatataaaatattattagattaaaattaatttttataaaatttattatgtaaatttatatgtatattaaaaaatttaatgttatatataataatgctaattatatttttaacataattgatctattagcttaatggattaaatagcataagaaaattcttatattttgatgtatccgtagggtaacttttttccaaggtgaggtgtg

SEQ ID NO: 34 - DNA, 104 bp, Glycine max
tgtgaacatggtataaggacaaatatatggaatgtttttattttattttattttattttactttttgttcactatatttactatgatttattggcatagtggtt

SEQ ID NO: 35 - DNA, 89 bp, Glycine max
ttctttacactaacagagcatgaaaattatacattcattattcactagcttctatctatctatctatgtttatgcaagcaggaaattcc

SEQ ID NO: 36 - DNA, 149 bp, Glycine max
tccttccaccactctcgctccctctcctccgcctcaggtccctctctctctctatatatatatatctcttacattatacgtcgtttgattttttatatgtagtaataactaaaagtctaatgttgaatcatttttcagctccttccgac

SEQ ID NO: 37 - DNA, 116 bp, Glycine max
tcaggtccctctctctctctatatatatatatctcttacattatacgtcgtttgattttttatatgtagtaataactaaaagtctaatgttgaatcatttttcagctccttccgac

SEQ ID NO: 38 - DNA, 144 bp, Glycine max
tctgatacaggtttgggaatattttattgttcttctgttctgttatatatatatatatatatatatatatatatatatatatatatatatatatatatatatatatatatatatatatacggagagctgagtacttcttgctga

SEQ ID NO: 39 - DNA, 107 bp, Glycine max
cttggagctatgagagatgaatattttgatttgcattaaatctatgcagacattgaacatgtttttatttatttatttattattattcattgctttgtttactttgg

SEQ ID NO: 40 - DNA, 81 bp, Glycine max
agtgcactctacgcctgtgagacttttgtgaatatatatatataggactagtattgttttaatcacgacaagaattcagca

SEQ ID NO: 41 - DNA, 269 bp, Glycine max
atgagacgaggaccattgacataaaaaagatttaaaaaattgtttaaaaggtaatgataagagtttttcagactaaataaagtaagagttgattttttccccaaaatatgaatatagatgattaaaattcgagataaaaagaaaaaaataatataaaaattaaattaaatttatgtttttgaaacataaaatgttaatgtttaaaaaacaatatgaaatgaaaacataaaagaaaatatgtttttttatatcagtgaggatgtgtgaca

SEQ ID NO: 42 - DNA, 93 bp, Glycine max
gggcatgaattaaagctgtaaataagttaagtggttaaaaatataacctttttatttatttatctatttgaacgagacaaagcaattgcatcc

SEQ ID NO: 43 - DNA, 148 bp, Glycine max
ttggaggaaatatgggtgtcaagtgacaaaaccttaccatacatatatatatatatatataaatttataaatagatgtctaattattaaataatcttgaatatataagaaagttgaattcagtttatattagatgtgccaaatacgca

SEQ ID NO: 44 - DNA, 95 bp, Glycine max
gctgccaattcattgtaaatgctcttgtaatttcatagttcttcctcgtgccctctctctctctttctctccacacaaacacacacattcgcaca

SEQ ID NO: 45 - DNA, 136 bp, Glycine max
tgccaagcgagagttatgcatatatatatatatatatatatatatatatatatatatatatatatatatatatatatatatatattattttatttttttcttctgtttctttaatctgttgaagagttcaatgaca

SEQ ID NO: 46 - DNA, 116 bp, Glycine max
gaacaaacgcatctgtcttagttcttaccccccctctctctctctctaaattaaaagtccttgttataacatcatatttataaattttacgttaacccaaacattacttaattctc

SEQ ID NO: 47 - DNA, 94 bp, Glycine max
agaaggactcatggatgcatccatgtcatcatcatcagagggcatgatcatgttgagcccaagcaattcacacaacaacacaacaattggccac

SEQ ID NO: 48 - DNA, 94 bp, Glycine max
gggtcccgttaccttaaatttccaacaaggtggtagcaaacaacatattcatcatcatcaccacacaaaaataacaactagaggagcaatgcca

SEQ ID NO: 49 - DNA, 236 bp, Glycine max
tgtttgccagcctgtaatatacgttttaatttattgtctcgattcaatttctttagtttttgtggctttttcaatgttgagttccccttcattactctctctctctttataccaacaaaaaaactgacctccaaaaattatggaaaaaaggtcctaaaatattgatgaacaatataagttgtgtcaaaagatatagtgagtactgtggaaaaacatttgatgatctcgagctttga

SEQ ID NO: 50 - DNA, 175 bp, Glycine max
tctttcaagttcttgggtgtattacatcataccagaatcaaaacaaaacaaattaaaaagaaaaaaaatgttaaaagtaggcttatagtaaaattgttccaaaaactaaaaaaaatacatacagttcttgtaatggcactaatagcactacagacaagaggtttcttgttgtgca

SEQ ID NO: 51 - DNA, 117 bp, Glycine max
tcatgaccaatggagacataattctgtgactaaaataccaaaccaacacaaatagatgaaataaataaaaaagattgtgttaaaataaaataaaaaagggtaaatgtttgcaaatct

SEQ ID NO: 52 - DNA, 88 bp, Glycine max
ccttcccacactttggtaatatattacctttcctttttagcttttctgtaaataataataataaaaacaccaagcacttatatatgct

SEQ ID NO: 53 - DNA, 128 bp, Glycine max
aatatgcggtgtctacaacatatatatcaaagaaaaagaaaagaaaaggatctaccagaaaagaaaagagataattaggcaaataacatttttttacaaacttatataaccaataagtatttgccttt

SEQ ID NO: 54 - DNA, 180 bp, Glycine max
aaggatgaaatgtgtaatttagtttttaaaaataaaataattttttatgcataaaaatataaagtgtttttaattaaaataaataagaaggtaaaatattcagatttgttggggaataaattttattcaattttttttttacaatttctttctttctactttctcctgttagagcctctg

SEQ ID NO: 55 - DNA, 276 bp, Glycine max
tttggtctcgttaatgtttttgaaataattaagtttttcttttttaaaaatgaaatgaaattgatatttttctcaattttcctttttaaaaatgaaatgaaacgattttttcttattgatttataagatttatttttaaaaataacttaaatttatgattatcatttttatttttatttttaataaaataataaaatttattatttatgttttttagattgacttataattagtccatttttagttaagtttttcaatccaatgacatataataaa

SEQ ID NO: 56 - DNA, 95 bp, Glycine max
cccacatcctgtctctcaggtgataatttatgcacctgcactgcactgcaataactttttcctgtcaatctacccatcctaccgttacaatgcaa

SEQ ID NO: 57 - DNA, 239 bp, Glycine max
tgagcttcatttgccattggggttggggtaataagttaaataaactaaaaaaccatttttaatgagagtatgaaaggtaaaagaaattaattttaatcatacttatatacaagatttttttagtatttaaatttaatatgtataatttatttttttcaattatataataaaaaatatttgatctcattttttaaataattatatatatatatataaggaaagtatctaataggaaattt

SEQ ID NO: 58 - DNA, 157 bp, Glycine max
aaatgcactcacagaagcatgtaatatagagtaaacttatactatcatttatagaatattatatatatatgtatatatatatatatatatatatatatatatatatatatatataacactttctaatattttttctttatttatctttgttacttca

SEQ ID NO: 59 - DNA, 324 bp, Glycine max
agcacgtttgggagaaaataaaaaaaaatgaaatgaatttttatataagttacaattaatttattcttataaactttgttaaatagattctttaatagattatttttaatttatgcattagttaattttagtttataaagaaatattatatatatatatatatatatatatatatatatattttattttcttagaagtgttttgaataagcttatatatcccaaacatattctaagattaattatacttaaatctaatcttgacagtctatgtgtgattgaatggtcaaaattaacttttgtcagttctggcgtggtccttata

SEQ ID NO: 60 - DNA, 243 bp, Glycine max
tccattcgttcaccattcttgaagtagttgataacacattaaaggatcctcaatgataaaggagttaatatatatatatatatatatatatatatatatatatatattcatttaaataaaagaagatgaacctcttcttatagtatcaatcttcatttaaaacccctcttggcttcttttagtccgagttcaaagatgatatttgtcataccatttcaccttatcaaccatgactgctacgga

SEQ ID NO: 61 - DNA, 259 bp, Glycine max
aatttaccctgacattatatcaaaattaaactcattcattttaaatataaattaatgtatatatatatatatatatatatatatatatatatatatatatatttaaaacaaacttaatattttattcaaaattaaaacatatcctttttattttatttttatatttttaattgcatgagataattactaatatagttatatttgtgagttgctactcataaaagaaaattgtgagttgctaacaagttacccaggccat

SEQ ID NO: 62 - DNA, 259 bp, Glycine max; identical to SEQ ID NO: 61

SEQ ID NO: 63 - DNA, 109 bp, Glycine max
ctcagccaagcaaatgacacaactactagaattaggtgaagaagaagaagaggcagcagcagagtgtgtagtagtgtaagttgaggttggcaaagccaccatttccttt

SEQ ID NO: 64 - DNA, 82 bp, Glycine max
aaacaaagcacctaaaccataacaaaacaaaacaaagtacccttcatttttttttgttttatagtagatacccttcctattt

SEQ ID NO: 65 - DNA, 150 bp, Glycine max
ccatgatggagtggagacttacctaatattaagttggtcttgttggtagaattgtagtctttgttcccattattattattattattaccatttagactcttaccttacaaatatagggtcaccacttaaccatgagatggacatgttgcc

SEQ ID NO: 66 - DNA, 180 bp, Glycine max
agcaaccatcattggaaattggatatatatatatatatatatatatatatatatatatatatatatatatgtgaaaaagttgagtataatctttgtcattcaaaaaaatgttcagctaaagttcaattacattatagtggtagtagctcacaaaaatagaagtgcgagattcatttatgc

SEQ ID NO: 67 - DNA, 116 bp, Glycine max
cttggttgtcatggaggatttttttttcgtttttttatatatatattcccgtgtgtacactagattgtgaattaagtactcttattctactccagtagcttcactaaacttgtgcg

SEQ ID NO: 68 - DNA, 128 bp, Glycine max
tggactcataccctctcctaacataactcttccccatcgttttctttttcttgctgtataatctactaaataggccccctcctcctcctgatttcttctttgacttggatttccttgaacctccacaa

SEQ ID NO: 69 - DNA, 153 bp, Glycine max
ccatggagttcaatgtcatggctagtctattggagaagtgggttttataagaaaatggtgagtgagtgagtgagttcatatcaatattattattcttctgaatgaaacagtagtgtatctaccaaactgtgagttggagagtcattggtttga

SEQ ID NO: 70 - DNA, 164 bp, Glycine max
cggagctacatcaatgctggaaacttgttgtttaggataaagcaagcaatatatatataattcatattggaaacctttttgtgaaacatcatgatatccacgatagtacttaaaatggatatttagaaattcaatgatataaatatcttccttgtccgatcctt

SEQ ID NO: 71 - DNA, 142 bp, Glycine max
cggtgtggatgtgagattgttcttttaaccaaaaagtgaatatatatatatatataatcacaacaatctgatagactggtagaaatatcctgcaagaataatcagaatgttacttgacaagttaaagagaaagcacccaacc

SEQ ID NO: 72 - DNA, 107 bp, Glycine max
tttggcaagtgtatttcccctaaaaatagatgtttaaccttatatatatatggttaatgattcttggatggaaacgtggcttatggggaacctcccgtaggaccata

SEQ ID NO: 73 - DNA, 96 bp, Glycine max
tctgggcttcaattcgtatattttacaccttaaataaataaataaataaaaacaattattgtactagtgtgtgtaaaaaactttgcttaccaatgc

SEQ ID NO: 74 - DNA, 278 bp, Glycine max
tagacgggaaggtgatgagagttaatactgaattcatcataactacttgtatcaacccatattagctaatcatatgtcaaataacataaaacgtaactaatatacaaatgtattattattatattattattcacattcacatttgattgattgtatttttattttttaaaaattaattaattatttatattttaaaaattaaacaaatctaacgactcaattattttttcctgtttagaaccctcatattttatttttctatcgaaatgatcggatga

SEQ ID NO: 75 - DNA, 146 bp, Glycine max
acattcacatttgattgattgtatttttattttttaaaaattaattaattatttatattttaaaaattaaacaaatctaacgactcaattattttttcctgtttagaaccctcatattttatttttctatcgaaatgatcggatga

SEQ ID NO: 76 - DNA, 106 bp, Glycine max
aaacgagtcataccgacaatatatatatatatatatatacaaccgacaattaattacaaccatatatgtataacgtacacgtacgtatattatgccgcgtacgtag

SEQ ID NO: 77 - DNA, 111 bp, Glycine max
gtatttagcggcaagcaaattctagcaatctcatcatattaattgttgattcgtccactttactctttactgaaaaaaataaaataaaaccaagtcgttgggagtgaagtg

SEQ ID NO: 78 - DNA, 116 bp, Glycine max
caattggcgaatctgaatccataactaggataaataaataaactagaacatgtggttttcttcaatttcttgcaaattcaattgaattgaattgatcaattctcacgactttggcc

SEQ ID NO: 79 - DNA, 116 bp, Glycine max; identical to SEQ ID NO: 78

SEQ ID NO: 80 - DNA, 98 bp, Glycine max
ttggcatggcactataaatgcactttgtaatatattggttagttttatttttttattattattatgacttatatactttaatgtatggttgatggcac

SEQ ID NO: 81 - DNA, 162 bp, Glycine max
tcccactcctaattcttgctgtcgtctctattttctttctttctatatattctaacgaatgtttatatgattatgcacgttttctattattcatatttcttttaagctttaacgtcagttttaattaactaagttatccgaggagagagttcctgcctcaca

SEQ ID NO: 82 - DNA, 170 bp, Glycine max
aacactgaacaaccatttaagtattttcattatagagaatgaaacgaatatatatatatatatatatatatatatatatatatatatatatatatatatatatatatatatatataattcaaaagatatattatgaaattcaaaagaaaaagacggtactataaatgcca

SEQ ID NO: 83 - DNA, 172 bp, Glycine max
aaattcagcaaattaagatcataatagaatttataaaataaaataaaaaagaaaagaaaactaaaccattttttcatgttataaaaagaatttgttaacaagtcaaagtaaattaatttttttttactttacttccttatataacatattcatgtgtaagtatgaaattgca

SEQ ID NO: 84 - DNA, 368 bp, Glycine max
tgtgtaaatcactactcactttaattttttttgaatgttatatttattaggaatattgatagaaaaaactaattaatgttactttaaaaagtcaaataaaatattttttggaataatttttttttatcaaatacaatacttattttgaaagaaatatagtattgagtaacatttttttagacaaaagctaacaaatatcttaaaaagtgattttttttattaagatacataaaattgtgttcataatttttttatgttaacttatgattttttataaataattttttattttatttttttaatcaatatcctgacacattaattaagaacttttttttatttgtaaactatgacctttccgtttctca

SEQ ID NO: 85 - DNA, 380 bp, Glycine max
tgacctttccgtttctcacacataaaagttacctactgactactgtgtctcatctaataaattagtaaaatgtaactaatttgtcacatttgaaaagataaatacacgagctaaaattattttattataaaaatgatatgttaattaattaagtttaaaattaaaatattgtccatcttcaaaaataaataacataaataaattatttattattattattattattattattattattattattattattattattattattattattattattattattattattattattattattatcacggataacagtaaagatatccaaattgaaagaacaataaatgaaaattttaaacattactttcacggaagaaatgtca

SEQ ID NO: 86 - DNA, 380 bp, Glycine max; identical to SEQ ID NO: 85

SEQ ID NO: 87 - DNA, 73 bp, Glycine max
tgccaacctttaagaataccaattattttgaagcatgaaaaattaattaattattgtttgggaatgctagttt

SEQ ID NO: 88 - DNA, 96 bp, Glycine max
aggttaagtgtgccgctatttttgtatctaatttgtgtgtgtgtgtgtaaattggcttcctcttgaactctacttgatgtttatggtgggtgacga

SEQ ID NO: 89 - DNA, 124 bp, Glycine max
aaactaccattcatttatgtcattatattgtataaatttcatttacatttcaaattaatatattgacatataatgaagttcttagtattgttgttgttgtatagggatggagattgagattgaa

SEQ ID NO: 90 - DNA, 109 bp, Glycine max
ggaggatggctttgagttgcatcgatgtggggccatcggtgaactgctgctgctgctgctgcatcgttcttgttatggaacataggaagttgttctccgaggtttggat

SEQ ID NO: 91 - DNA, 140 bp, Glycine max
aaatttatcaatcgtcacaaataaaaattaaaacgtttttcaattggttttaatcttgaataaaattgattttattttatttctttttaataaaaatttaattgtttctcctaatcgtgacatgttagcctctgaaacgg

SEQ ID NO: 92 - DNA, 113 bp, Glycine max
agcctctgaaacggaaatatattaatatcccttataaaagtctacggacagaaagaagaagaagataagtttgtacataactttccacatatttggtggtcccaactcaacct

SEQ ID NO: 93 - DNA, 180 bp, Glycine max
agcacaactccaactttattggagaaattattgtatgatacaagtaactatatgatttcaccaatcaattaatattgtgtatgttaattttaatttgttaaattttataacaattgtcttaaaatttatcctaaagatgattttatttatttattgacgctgtaagtgactatgtacgct

SEQ ID NO: 94 - DNA, 150 bp, Glycine max
acattcaccaagaaggaaatacatatcaacttatatatatatatatataatttaatgtaagtataaattcaagatttaataatatttcttaaaatatatttaaattttgcaattgattcctaaaataaaattgtttcttgttgggtctct

SEQ ID NO: 95 - DNA, 161 bp, Glycine max
tttgatttagcaaacacattattttgtagttttgtatttaaaaaaatcattatgtttaacataaactaacttataattaagaataaccattgatcttttattttattttatttacaaatgattaaaatgggacacatttgatttgatttgatggcagagct

SEQ ID NO: 96 - DNA, 113 bp, Glycine max
aattaagaataaccattgatcttttattttattttatttacaaatgattaaaatgggacacatttgatttgatttgatggcagagcttctgggtctatctccaaactcccgtg

SEQ ID NO: 97 - DNA, 99 bp, Glycine max
gtgacgcggctatcttcagaaatgcttcgttgagaaccaattcagcttcaacagcgggaacaccaccaccactctcagacatccacaagggctcttatg

SEQ ID NO: 98 - DNA, 102 bp, Glycine max
gttcttgggaagggtcagacccaaagaagaagaagaaaaaaaaaccctacaactaagccttttcccacctggcaggttggctatttggatcagaagatgcca

SEQ ID NO: 99 - DNA, 116 bp, Glycine max
ttgacccaacattctgtttgtaactttatttataaaacaaatatttgtacttcaattataacaacaaatttaagaagaatatatatatatatatatttgtgatggaaatgatcatg

SEQ ID NO: 100 - DNA, 98 bp, Glycine max
aactccgtcctgtgtggaaaatgaagagagaggagaattgagttgggttgggggcatggaagaagaagaagaagggcttgccatgctcatcactcacc

SEQ ID NO: 101 - DNA, 153 bp, Glycine max
tggactcaggatgctgttctttttctctacactttactttttgttttcttttctgtttttgtaaaccttcttcgtgtttataaggttgatcctttcttttgtgaaccgagttggttggttggttagtttgtttgtccatcctcttaaacctgc

SEQ ID NO: 102 - DNA, 107 bp, Glycine max
acccttccctacaccaaggtctaactctaatcctttacacacatgacacatgcatacgcaagcacacacaaacaaacaaaagtttttttgttatgaatgcaagaccc

SEQ ID NO: 103 - DNA, 146 bp, Glycine max
ggaaatgccgtgtactcagtagtccacacatcaaggtttagataattttctctatcctattattattattattttgggtgtcaaatctctctgttattcaaaagggaaacaaaaaactgtttgaaatattctggtcaacaaaggcc

SEQ ID NO: 104 - DNA, 202 bp, Glycine max
tgtcaaataggtgggtatgtttaattatgtaactgatattatcatgatatcaatattacctggctaaattattttggatttaagattttaagtaataataataataataaaagtaaagatttatatattcttctaaaaagaatttatattcgtaaggtatttataaaatatatacagtagtaaccaaacagtaggcccagtg

SEQ ID NO: 105 - DNA, 162 bp, Glycine max
ctttaacaccagccctcatgacagatactactagacaggaatattattactattattattattgaagtagtagtagtacttagttacttttacaacatttatttggagtagagcaaaataatttgtgacacaatatatacaacttgtgatttgatgaagggc

SEQ ID NO: 106 - DNA, 162 bp, Glycine max; identical to SEQ ID NO: 105

SEQ ID NO: 107 - DNA, 130 bp, Glycine max
tttgcacccaacttgactacactcctctcctaggacagaggtgtttgttatgactccattttcatgtaccttattattattacattttacataggttgttgtcatgttcaaattggttgttgactccacc

SEQ ID NO: 108 - DNA, 146 bp, Glycine max
aagatatgtggtgaagagaaaaataagagacatggagaaatatataaagtaaatataaaaaaacatgtgtaaaaattaaagattatttgaacatttttccaattgtaattgaaaacaaaacaaaaaatcattcaaagccatgttcc

SEQ ID NO: 109 - DNA, 116 bp, Glycine max
gagaatctgatttgagccataatttataatttttagtaattttttcatctcaatcaagactttaacttaatattttattttatttaaagagattaaattcattaccctcgtaccaa

SEQ ID NO: 110 - DNA, 230 bp, Glycine max
accctcgtaccaatgatttgttattttgatctcaatttttttattattattacttgtgttcaaaatatgcaatataactttatatatatatatatatatatatatatatatatatatatatatatatatatatatatatatatatataacaagcttgttaaaatatactatagtgtttattgctatattcttttgacaaatattgtttttttgagtggatagtttggaaa

SEQ ID NO: 111 - DNA, 230 bp, Glycine max; identical to SEQ ID NO: 110

SEQ ID NO: 112 - DNA, 94 bp, Glycine max
tttccttcgatcacaagcctaacatcttttataatgaataggtgtgtgtgtgttagccttgtggggattctgtggatttgacagcggttctttc

SEQ ID NO: 113 - DNA, 131 bp, Glycine max
tttgacagcggttctttcttctctctctctaacacaagcctatacctggaatcagctagagttgacacccacaaactgtttgaactgtgtctttttaacttgtgttggttactgttgtggatgagcttgct

SEQ ID NO: 114 - DNA, 100 bp, Glycine max
ctggtttctcagcagtggaattattatggacaccaagatgggtggtggaggtggtggtggtagcaagatgtggcacaaaaaatggtgggagaagatctca

SEQ ID NO: 115 - DNA, 98 bp, Glycine max
gtctagtttagatagtggaagtggccttcccttcccttatggccttatcaagtatcaacaatggtaatggttcctatacccacaacattcattcacaa

SEQ ID NO: 116 - DNA, 121 bp, Glycine max
tacgcgagagggtgtagacgtgtagtatataaaggaggggagagagagagagagaagtgggagagaatagagaagagagatggatccagacgcgttggcaaaggcattcgtggagcactac

SEQ ID NO: 117 - DNA, 106 bp, Glycine max
ccctgccatgaaacaatagcatgagtgattatgaataactattacaataacatatatatataagcatatcacacaaatagttatgtacattgaaggctgattctgt

SEQ ID NO: 118 - DNA, 138 bp, Glycine max
agatttccaggtcgaagcttgcgatgatctaagagcggaattgaaaccaaaccaaacacaaaaaaatatcgattctaagcaaacaatagaatcattcattcgattattattattttttccttgtctttcttagccgcc

SEQ ID NO: 119 - DNA, 108 bp, Glycine max
aagagcggaattgaaaccaaaccaaacacaaaaaaatatcgattctaagcaaacaatagaatcattcattcgattattattattttttccttgtctttcttagccgcc

SEQ ID NO: 120 - DNA, 173 bp, Glycine max
ttcacatgtttgttgaatgaattcaaatttatctttactaaaatatataatataatatgataaaaaaacaaaaaacaaatttgattaatatattaagaagggaaaacttgttccacatctttttgcggtttatacactattaatagcaatacaagaaatgtgaccggtgattg

SEQ ID NO: 121 - DNA, 108 bp, Glycine max
tgcagaaagatggaaatgaaatttgtatttgggggagtcaacagtgtttgagccgttgaaggtgaatgaagaagaagaagagaaagaagggatgcgtgacgttaggat

SEQ ID NO: 122 - DNA, 154 bp, Glycine max
ggattaacagaaatacagaatgcttactaagcacttgcactaaaattgcatcacatgaaattattattattacatctctaaatataattttcaaatagatagtttaaaatataactaaaaataaatactataataccctatccaattctggaca

SEQ ID NO: 123 - DNA, 103 bp, Glycine max
ttgaaactttagtgtcatgtgtctggttagttagttagcaccatcagtttaatatatatgttcgtacttaaatgtgaataaatttcaattgccatactcaaga

SEQ ID NO: 124 - DNA, 114 bp, Glycine max
acgctgaaccagaccagatatctgcaatttcaaagcatagttcctgcgactaaataataataataataacaatattaatctcgacagtgatctatttttccaagcgacagttct

SEQ ID NO: 125 - DNA, 120 bp, Glycine max
cggaattgcaccaattatctaaatagaagttaaaatatgttagatattaaaccaacaacaacaacaacgccttatcccactaggtggggtcggctacatggatcaacttccgccataatg

SEQ ID NO: 126 - DNA, 161 bp, Glycine max
cgattcgctttatctccaccttcttcttccccattcttcttcgcgccgaaaccctagctagcttctttttctattcggatttctctctttactatccccgaccttctactattatctctctctctctctctctgttctgttacagcacttagcagcgagaa

SEQ ID NO: 127 - DNA, 284 bp, Glycine max
atataacatttatccatcttaacttaaataattagtaaaaatattttaattaaacaatttttcataaatagatataagttatatatatatatatatatgatagttttataaatatataagaaataaaaatagaaataagatatattataaatttatgaataaaaatatatacatatttatgagtttgattttgatcggttttcaattttttaatttatttgatttttgattttttggatcgattttttttgtttatattgaatttgatctatttatgagcatcc

SEQ ID NO: 128 - DNA, 135 bp, Glycine max
cctagagtcgtggtagcaaaatcaaactttatatatatagttaaaggaacaaactatataattaaattaaggaacatatatatatatatatatgtatatcgattcttttgatgtttttccttagtgacctggaca

SEQ ID NO: 129 - DNA, 192 bp, Glycine max
tgcagcttgctatcactgtaagctttaagttgtttaggcattagaccagaattacaaagaagtgcttggtttttttttttatgtatatgcttttgttaatttttaaaaatatcacttttaaaatttatgtgtcctagtttgatatttttttctattttattttattcataaaaccaaagctcaatcacattg

SEQ ID NO: 130 - DNA, 103 bp, Glycine max
atctgtttgacggagcagaaaaacggcaatctcaaatgctgggttttgcaccaaaagaaggaaagaaagaaagaaagaaagagaaagctcaagactcacctaa

SEQ ID NO: 131 - DNA, 163 bp, Glycine max
caaacagcaaatatcaaacggggagagatttgaagatctttaaaggcaaaaataataagaaagagggttttatttatttttttgttatttcgttttttcgtgtaatttgttaacattttggtgaatatatatctatatatatataccttgaactgctgcagaa

SEQ ID NO: 132 - DNA, 99 bp, Glycine max
cactcttcctcttcccatttctctctctctctcttacacactctaatgtccaataaagggaaaaactaaaaataaaaattggaataaaccaaaccctgt

SEQ ID NO: 133 - DNA, 75 bp, Glycine max
gctcgctactgcgtgtatgtcttgtacacgcatatatatatatatttatatagccacgagagatggtgtcaatga

SEQ ID NO: 134 - DNA, 139 bp, Glycine max
tagccacgagagatggtgtcaatgagcttacattaaaaatgtatacaataaaaggggaatattatatattatgatttgtataattattattatttgtgtgaatgtgagcaaaaccatctttatcaatgccctaatgcaa

SEQ ID NO: 135 - DNA, 127 bp, Glycine max
tgaattggcgttgaaagttaaatcttcagatttaattcacgcattattattattattattataagaattggattagataaaagaatggttaaatttattattattttgttaggcttatacctttaca

SEQ ID NO: 136 - DNA, 108 bp, Glycine max
accattgtccatcctctctaatgtttcttttaccctaaactacagcttactaccaaaaataaataaataaataaataaaactgtaagtatagcataaccgcagacaaa

SEQ ID NO: 137 - DNA, 119 bp, Glycine max
atgccaccatctcaacacccttttctgccgccatctccacaacgcaaaatcagttcagggattcaaaaaaaaaaaaaaaaaccagagagagagaaagtgaaaaaggtgttggctttggt

SEQ ID NO: 138 - DNA, 137 bp, Glycine max
tcccaacgcaacagtaacgtaaatatttgaagtgaaactatactcttaaatcaaatgtactagtaactgtcacaaaatttaattcatatatatatatatatatatgcataataataatttctctcatgcataagttt

SEQ ID NO: 139 - DNA, 142 bp, Glycine max
gaaagcattgaccaaggaaaacggaacgaggagctggtatatatatatatatatatatactgagtgctgacaaggtaagtttttgtctactgatattacacatccacaaagaatattatctgtgattgtgggttaagatggg

SEQ ID NO: 140 - DNA, 110 bp, Glycine max
gtcgcagcaagagttgacgaatgatgaacatgcttcaaatggagttatatatatatatatatatatatatatatatatatatatatatatatggtcttgcacgaggtatg

SEQ ID NO: 141 - DNA, 223 bp, Glycine max
ttggtacaatctcagggactaaattgtctattcactcaaagaaaaactaaattatatttaataaataaataaaattatttacaattataaaaaatgaaagcaaaacaaaagaaaataaaaataaaataaaaatctaaaagaaaaaacattaaaggttaaaataaaacttacaactttgaagtggtaagttaaaaaaaacttacaacttcaaagtcataccgtt

SEQ ID NO: 142 - DNA, 223 bp, Glycine max; identical to SEQ ID NO: 141

SEQ ID NO: 143 - DNA, 235 bp, Glycine max
acaacttcaaagtcataccgtttttaaaatatatatatatacaactttgaaatcataaataaaaaaaaattaaattgaaatcatataaaattttacgacttcagttaagaaaaataaaaataacaagtcatagcacttattacgatttatctcattttcaataataaaaattgaaaaaaaatacatccttttggtaaaaattccccacatatcatggtggtggtgcacaagagat

SEQ ID NO: 144 - DNA, 100 bp, Glycine max
gtccctgtcactgcaatccaagaaaacaaaataaaataaaaaaatatacatgtagaagagtttatttgcattttaattatgaaagctaactcccaatcga

SEQ ID NO: 145 - DNA, 143 bp, Glycine max
agcagaaatttgaaagaaaaatatcacaagttaaagtcatattgtataattatttaaatttaataataataataataataataataataataataataataataataattaaatattactcttctttatgtagttcaatgaca

SEQ ID NO: 146 - DNA, 223 bp, Glycine max
aagctgatgtggtttccatgccttttattccaatagctttttcaattcattttttttctctgttcagactcactttttgctattttttgtattttgccttttctctcctctacttaactcttgttttccttccatttttctcctatttactatattgattgtaagcataacatgacatgacatgttttgatatttatttctttttggttacattctcatgtca

SEQ ID NO: 147 - DNA, 109 bp, Glycine max
gagtcctttggccttgttaataatggagaagagaaagtgaatagagggattaaaaaagaggacttcaaaaaaaaaagagagagagagagagaaacctcgtaccgtgtcg

SEQ ID NO: 148 - DNA, 105 bp, Glycine max
ggataattagtcttggccatcattaaacaaacaaacacttggctattcaattccatcaaaattctgacaatctttttgtaacggttaaacctccaactttcggag

SEQ ID NO: 149 - DNA, 110 bp, Glycine max
ttctctgtccacctctgccattactcttctcttctctctccctaaagctgctgtataattacttgattaacccttcctcatatgccttagtttgacccttctcaactcga

SEQ ID NO: 150 - DNA, 118 bp, Glycine max
ggcttcggagtaaggaagagacaattgtgaggcaaatcatcatgtgaacacctagtggaataaggcttttgttgttgttgaacaaatcacatgaacaaaatgaacacaaactggagga

SEQ ID NO: 151 - DNA, 89 bp, Glycine max
cacttcctcgaacgtcacttcctcctcctccttctgcgcctgcctcagcatccggttatgctcctccaccgagaaccgccctagatcct

SEQ ID NO: 152 - DNA, 91 bp, Glycine max
aattgtacggcagacacgtcctcgccgcggttaagaaagtgcgctctctctctcagagagtcgacggcgactacgacatgaggatggtgat

SEQ ID NO: 153 - DNA, 107 bp, Glycine max
ttggatgaaattgcaggttcacttcctctctctctctctctccttacttcaatcttgtgttgcgtagaatatggtttggtttataaaaattgtttgcatcgtttcct

SEQ ID NO: 154 - DNA, 213 bp, Glycine max
ctcaaacctccaatcactaaattgatcctaatcaatttttcagcaaagaacaatattacttatttcatcctgttaaatcttagtatctatcagcataaagaattttataatgtcattcaattaaaatcctctctataaaaaaatcaataattcacctctaaaaaaaaacaaaagtgaatcatgaatgaatgaatgtgtaccttggcctagcct

SEQ ID NO: 155 - DNA, 149 bp, Glycine max
ttgtcaagatggttccagatttatcatgttcgttccatttatttttttactatttattgtggtttatgaatatgatggtgatggtgatgatgatgaagttccaacatttagaaacaagatttttcaaatctaacgatccgacaatgaag

SEQ ID NO: 156 - DNA, 290 bp, Glycine max
tgcagcaacatatctggactttcttttttaccggtagaaaaatttcacatgtttttaattaaactaagatataactttaatcttcttattttgttaattcactattttttatctaatttaaaattgagacgtttagttttcaggtttcgaaaatctctaattttagttcgatcttgaattttgtcttcatttaatattattattataagagaccaaaacacaaataatatatgtatttaaacctttattttatgatcaaaatatatgtttgcaaacctgggcacataatg

SEQ ID NO: 157 - DNA, 153 bp, Glycine max
gccctccgaagaaacatatatattgatgtaaataattgcagaaataaaatacccgcaaaattatttttgtccaaaaatacagaaaaaaaaaagaagaagaagaaatcacttctttttcttaagttgtttaacatttttggaattggcttgttc

SEQ ID NO: 158 - DNA, 212 bp, Glycine max
acgcaagcttcactcatcattctgctaccagaatttagtttaaacaaattaagataaacaataataataataataataataataataataataataataataataataatttatatattaaattaaagaaaaaaataactgatgtgttaaaattgagaggaaaaaaagaatctaaactatgatccattacttcaaatcttcaatatgggttt

SEQ ID NO: 159 - DNA, 400 bp, Glycine max
ttgcctagtttggtgacgttgttcttaactttcctgtttacgccttaaggcagaatctgcttgtatttcttcttctttttttagatttttagttgcctattttttgattttctttttctttttagaatatattttgtggcttatgttaatatatttacttaaataataataataatactattacgtttgaataaaaaaccaccgaagaaaactttttcctttttatatttttcaacatatattacgttatatattaccaaataaacagataaatttttactctttcttaaaagtcaagctaattaattaactgaattcgttcataatttcgtagaagtaatactatataatgttatatacagtattgcattagatatatcttttgagaccaatgcacatt

SEQ ID NO: 160 - DNA, 136 bp, Glycine max
accggtgacccaatctattttttcaatttctgacccttaataatcaggcaacaaaaaagtaaaataaaaaatagtgttttaaaagaaaagaaaaaatcaaaagacaacaagtcaaatataggacgcattatgcaaa

SEQ ID NO: 161 - DNA, 102 bp, Glycine max
ggccgcaagtactaccaccctccatccctctccgacaaccacggccaccactaccacgctggtgccaccaccaccagcgccggcggagtcaaagaggccgtg

SEQ ID NO: 162 - DNA, 113 bp, Glycine max
ccatgttctccacaaggaaacagagaaaaaagagagagagagagagagagaagaaacaaacgatgcagagaagactataccgaaccaacttcaaaatggaggaaacatcagca

SEQ ID NO: 163 - DNA, 118 bp, Glycine max
aatggaatatggaaaggaaaagagagagaagaagaggaagaagaaaggggggaaaagaggatgagggcagtgaccctttaaagagaaaatgcaaaagaaaaagcacctgcagtgtgag

SEQ ID NO: 164 - DNA, 158 bp, Glycine max
gcacctgcagtgtgagttcttctttgatcctggttatccattgacaatgaaagagagtaagaaaatccaacaagtgaaaaacccagaggaagaagaagaatggagaggccagaaaaaccaaaactttagtggaatggaagcagaacagagggagggtt

SEQ ID NO: 165 - DNA, 121 bp, Glycine max
agaacagagggagggttggtgtatgtgtgtgtgttagagtaagataaacagagaagctgcagagaaagaagagggtaattacaatggaagtggactagtacactcctggtttggaagaaca

SEQ ID NO: 166 - DNA, 121 bp, Glycine max
accgtgaagatgatcaagagagagttcgagtatgttagtgcctactaaataaaacaaggggacaatattttctatgggttgggttggggttgttctccataaagaggaattgttgtttggg

SEQ ID NO: 167 - DNA, 99 bp, Glycine max
cgttgctttgaacaaggtccttcctctctctctctctgtttccgttctttatttctctctcgcgtttggtttgctttgctttctcctccaggtgtttca

SEQ ID NO: 168 - DNA, 100 bp, Glycine max
tgcatgcatgtaaccagaaataataataacaattaacaacatgcatgcatgcataccggcttttttcataaaaaaaaatgtttttacgtccgtccaaatt

SEQ ID NO: 169 - DNA, 190 bp, Glycine max
tgcatgcatgtaaccagaaataataataacaattaacaacatgcatgcatgcataccggcttttttcataaaaaaaaatgtttttacgtccgtccaaattattttattttatatttcggccttttagtttgtgattgattttgattaactataaaataaattaatttcaacacctattcagtgtactttg

SEQ ID NO: 170 - DNA, 96 bp, Glycine max
tgccatttgatgaggaataagtagttttgattaattaattaatggacctatacatgtgacgatatcaaccatcaatgtcatcgtgaccaaccaatt

SEQ ID NO: 171 - DNA, 117 bp, Glycine max
gcccaagttattgctccttcacgcgtccaaccatagtcccatacccaaatcccatcttccatttctctctttttcacacatatatatatacccctcttttgaacacattccctcaca

SEQ ID NO: 172 - DNA, 148 bp, Glycine max
tgattagtttctttccttctccatatatatatatatatatattatatatatatatatgagctaaaacagtaatactgtagagtttttgtatgtgtgtgtatgtttgtttttcttttaggtagttttagcattgattcttgatgaaaga

SEQ ID NO: 173 - DNA, 153 bp, Glycine max
ttggcctgaataatttgcaatagttccattcgtacatatatatatatatatatatatatatatatatatatatatatatatatatatatatatatatattatataaatgctattttgaaccatcttctgctatcaactatcccacttcccacc

SEQ ID NO: 174 - DNA, 157 bp, Glycine max
cctcggccaaacataactagtctaacagttttgtttgtatctataattattgtgtaaatgattgtacttagagatccctcttcatgaaaagagagagagatgcccagactcctaaaaatatctaaaatgcaataaaaatgattgtttgttgtttgca

SEQ ID NO: 175 - DNA, 176 bp, Glycine max
ttggacactgtgagaggtgtttataaatcgagagagagagaaatattaaagaaaaaaaagctaataaacgttttaaagagatatatatggtgaggtaattttgattttgattttgtttgtaccttaggttttttattgaattaaataatattgttaaggtcgaatagaatcatgga

SEQ ID NO: 176 - DNA, 106 bp, Glycine max
ctcagaagcattggttgcatcagagttttgttatggtgtatttagaaaaatctttcttgaaaaaataaaataaaacggtatttcgccaacaggtcagcaacaacgt

SEQ ID NO: 177 - DNA, 142 bp, Glycine max
tttgttggctctccttgacaagcatatctatttaatttatacaagtagtaaataaaatgataagactaaatgatgagttcacatatactttatttgtactcatatatatatatatatatataattcttggatggaaaggacc

SEQ ID NO: 178 - DNA, 168 bp, Glycine max
agcctgtttcaacctgtaaaaaaaagtctgtttcaaaattattttttatgcattttacttaaaaaaattagacctaatgaattttgaatattgatttgatttttttaagagaatatatttttgagttatatatatatatattagtagtcctacctcgttctaatattt

SEQ ID NO: 179 - DNA, 127 bp, Glycine max
gaaattgcacgtgggttattagattgtggacgtccatttttgtgggtcgttagagaaaaggtaattaatggaaaaaaagaagaggaggaggagctttgttgtttcagagaggaattggagaagtggg

SEQ ID NO: 180 - DNA, 90 bp, Glycine max
tccctacttgattgagggtagttttttcttaatactagctgagtgaaagaaggatatatatataatccaccggcagatttgggttctgtt

SEQ ID NO: 181 - DNA, 138 bp, Glycine max
aaacatgattagtcttgacacataagataaacattaatttaatttaaaaaacaaagaaaaaagtgtagaggggagacatatatttgacattttttatttcaaaagaataagagaaatatatatggtgcttgcatcttg

SEQ ID NO: 182 - DNA, 123 bp, Glycine max
tgaaataaacatgtacgacacacatatatacatacatatatatatatatatatatatatatatatatatatatatatatatatatatatatatatatatatatattttggcagcacacataaa

SEQ ID NO: 183 - DNA, 107 bp, Glycine max
ccaacccaagttcaacacctctctctctctctctctcacacaaacacttctcccaaccctaatgtctctccccaaaaccctactttctctcttccttctcctcacga

SEQ ID NO: 184 - DNA, 135 bp, Glycine max
ttggtcggtgtacctgatcgtgaggatgattattttattttatttttgggaagggaaggactatacatttattaattgtattatattcttttttatccctttttgaatcagaagtatatttatcgcatgtgccat

SEQ ID NO: 185 - DNA, 169 bp, Glycine max
tgagttggatgaggtggttagatagtctttatgtaaatactagtagttccaatatttaaatccttaacatggttggtaaagtctagataaggttttatacctccattttggaactaaaatcaagccttttatccttaccttacctttcggggaggaagcaccacttgaa

SEQ ID NO: 186 - DNA, 171 bp, Glycine max
tggagtaaggtcttgtttgaaattattttttaatttcaaaacttgttttcaatataatttttagctttgttatattttaaaaataaaataaaaagaaaaaatatttgttaaaattcaaaaatagattttttttaaaaaaatgttcataaaatatcagcatctgtcaattgc

SEQ ID NO: 187 - DNA, 161 bp, Glycine max
acaagcaagccttccaattagttacaacaacaaccaaacattttcctactaagtggggtcaactgcatatgtatttcacaataaataaataaaaaatacttaccaatatatttatttatttctacattttaaatttaaaattaggacatttgctcaacaca

SEQ ID NO: 188 - DNA, 161 bp, Glycine max; identical to SEQ ID NO: 187

SEQ ID NO: 189 - DNA, 183 bp, Glycine max
tcagaaatggagatgcataacaatgttaaagttagacaagtaaataccccatataaaatatttactagaattctagagagagagaggctgaatctgttttctgttattgattgatgaatcacttattactatctgatggaagatgagttttatataatagagttaccttgtcctgcaagctta

SEQ ID NO: 190 - DNA, 121 bp, Glycine max
acggttatgcgatcagttacatgtatactacagatcatgtgacattaatgaccaaaaagtaccatatattattattattattattattgtcatacaatggtgtccaagacataagcaacga

SEQ ID NO: 191 - DNA, 95 bp, Glycine max
cattgttccattgagtacacttcaaatttagagaaaggaaaattgagttgaaataatgaaatgaaatggatcataatccatcatcatcttccatt

SEQ ID NO: 192 - DNA, 108 bp, Glycine max
ttcatcatctgcttcttcttttgatcataatatctgttaagtgatctttcatagagagagagagagagagatggagaggtgtgacaaggtgatgaaccaacgcaacat

SEQ ID NO: 193 - DNA, 104 bp, Glycine max
gaagacttggtgcagcttaaacaatttctgtcaaaacgtgtagtttggtgattttatatatatatattggtgatgaatattcaattcaatgcaggaacaggaag

SEQ ID NO: 194 - DNA, 104 bp, Glycine max
aaacagccactttggattttacttgcacgcatatgcgcatgcacacacacacataacaaacactgacaaggttcaagaacttcactggtgtaagacatcggttt

SEQ ID NO: 195 - DNA, 174 bp, Glycine max
ttgggattcctggttcttggaatttcctttttaattttcttcaccttttctatatattgtatctgtgctcatatgaaataatagagatgatataattttcatactctactctactcatagatatccatactcattttgtattgtcatctggtatgcgtttgtgcagcttcaacc

SEQ ID NO: 196 - DNA, 111 bp, Glycine max
gccactcccgtatattcctcatcagagtcagtctcatactcagattcctcctcctcctcctcttcttcttcctcctcttcctcttcctgaggaagtgcctcttcctgctct

SEQ ID NO: 197 - DNA, 334 bp, Glycine max
cccagcttgttctgtgaacttttatttgatttactttctatagtatttatttttgtttttatgagtatgtaaatgacatctttatacgaatattatgttttcattaaataataataataataaatttcttaaaattaaatatatatacactaatgctcataaaaaaattgaacgaatatcatatttattaaaactaatttttttatactaaactaaaaataatttaaaatttattattattattattataaagatatttaaattttatattttggaattgtatatataagataaaatacatttaagtttcctaagttacaactttcgcatcggt

SEQ ID NO: 198 - DNA, 334 bp, Glycine max; identical to SEQ ID NO: 197

SEQ ID NO: 199 - DNA, 176 bp, Glycine max
ttcgcatcggttacattttaaaggttatatatatatatatatatatatatatatatatatatatatataataataataatttatgaataaaaaaattatacagcaactagttgtcattattaataaatatagatgataataataatattgtagcttgttcctaaaccctctcctga

SEQ ID NO: 200 - DNA, 176 bp, Glycine max; identical to SEQ ID NO: 199

SEQ ID NO: 201 - DNA, 150 bp, Glycine max
tcctcctcctagttgtgcttctcttttctctttaatgaatttcctcctatgtaaaaagcaatagaaaaagaaaaccagttttaaaaaaataaaataaaagaactaatttcaggtaccttcttccattttgcaattagattgcggtcagca

SEQ ID NO: 202 - DNA, 94 bp, Glycine max
ggtaatgaatcagatcaacgattttgggactgttgttgttgttccattttcagttttttattttgtttatgactagttgagtttgcaatcggtt

SEQ ID NO: 203 - DNA, 168 bp, Glycine max
tgcaaatcatgcatcctaagttttttaagtaaaataataattaaataataattttttcagtatcttaaaacatgaatcattaactttatatatatatatatatagattatacaaataagacttttacaaatgatgtaaaagattttactctgcaaatacacttgtgca

SEQ ID NO: 204 - DNA, 155 bp, Glycine max
tcaaatatttctcccgctacatatttttatttacctgaactcaacaaaacaaaaccttacgtatgagtttaaatgtactaatcgactagagagagagaggaaaaaaaaagataaaaatagaaataaatagacatttttattcccggaggaccata

SEQ ID NO: 205 - DNA, 99 bp, Glycine max
gcatagcgtcagcgtagttgcaaattccaggttttcttcttttactcaattctctctctctctctgaggttctggaaagatcaattccattccgaaatg

SEQ ID NO: 206 - DNA, 100 bp, Glycine max
tggatattggcactgagctgaattgtaatgttgcatgtgtatgatgaatgatgatgatgtgagatggagaaaaatgtatagggagatagagagagcttca

SEQ ID NO: 207 - DNA, 104 bp, Glycine max
tcgacatattctttgggattttgatgcctatttgttacgaagtctatttaatatagagtttagtttagttatcaattgcagggacttcttcagtcccacattgg

SEQ ID NO: 208 - DNA, 144 bp, Glycine max
ttcagcaaacaccgctataattaatggcaatgcaatgcaagactaaacatcgaagatgagtgacacaataaaaatagttgacccaaaaagagcacctatgttctagtgaagaatacgactttttcttgttgccactctttacca

SEQ ID NO: 209 - DNA, 99 bp, Glycine max
gtactcctggagggtctcacccttccaggcgaagacggcggcactgtcgcgggcaatagcggcggcggcgtggtcctgggtggagaagatgttgcagga

SEQ ID NO: 210 - DNA, 142 bp, Glycine max
ttgtgagaatctatttatttgtccttattattattttaattgattgagatttatatatatatatatatatatatatatatatatatacttactttttgtgaggttaattttattatgttttcactcttaaacattgtcctga

SEQ ID NO: 211 - DNA, 135 bp, Glycine max
atttgatgaaccgaccaaaaatattggtacagcataatcacaattattgagaagatatttttattttatttttaccgaatcgtcgcacgactcggcgtgttgcaaccgcattaaatctttgtgttggtctcaccc

SEQ ID NO: 212 - DNA, 101 bp, Glycine max
cttctcgcgtagcttgagtagatcttaaaattggatatttgctcaattaatacgcttataatatagtagtagtagcctagatctagatgcagtttgtcccg

SEQ ID NO: 213 - DNA, 89 bp, Glycine max
cagccaaatgcgtaacatttattctgatgtaaaaaattattattattattatagataataaaatcttgttcctgaacaataaccatcaa

SEQ ID NO: 214 - DNA, 99 bp, Glycine max
ccattccacctcaacaaacacaacaacactctctcttctcgctcttggcttttcgctcttcactcactctcattcattcatttccaccgttcatggatc

SEQ ID NO: 215 - DNA, 113 bp, Glycine max
caattggaaacaagatctcatttataagattataaaaatgatttccttaggctaggactatatcctctctctctctctctctttttcttttttatcatcgcagaacttagatg

SEQ ID NO: 216 - DNA, 99 bp, Glycine max
tggtccctcaaagaacaagtgttgcagcagtaaaactgcatacaccccaccccacctttacacgagaaccataagataaaaataaggaaacaccagggc

SEQ ID NO: 217 - DNA, 138 bp, Glycine max
gcatagcttaaggcatggtattaattattattattaatatgtggcagactagagtggtagatatcttacttggttgagttgatgtaattaaagacagcactaccatcagtaaaattgatatgagaagcaggaaggaca

SEQ ID NO: 218 - DNA, 97 bp, Glycine max
tgtgtgtgttccacatgcgtatataagtcaacgatctagatcaaaccattatcataataataataatcaaaccccattaattccaaggtgttgctga

SEQ ID NO: 219 - DNA, 409 bp, Glycine max
ggcgaggattgaagaaatggatatttttaggtgatgtttgttttaagatactggatatatttgggaaaaaattgacaagttagctttaagtaaaaaaatagttaatttaagtagaaatatttaataaaattagttatacaattagctgtaaaataaaataaaagaacatgtttatgtgatttttatatattttttatttttttttaaatatacttttagttagctactgtttttaatttctgttaattttgaacttttatcatttttaagatcaaatatttattttataaaataaaacgacagtataaataatttaattattaaaataaatagtttaatattaatgatagacttttattaaaatattaatgacaataataataatctgtaaattattaaatcaaccctt

SEQ ID NO: 220 - DNA, 409 bp, Glycine max; identical to SEQ ID NO: 219

SEQ ID NO: 221 - DNA, 132 bp, Glycine max
ggccactacttggatgaaaacctccacttaatttaaagaccaattttctaaaaccatgcgtttatttatttataaaacccctacgcggtaaaaataaataaaaattgctagattttgattctgccttctgaa

SEQ ID NO: 222 - DNA, 159 bp, Glycine max
aatagcgtgattggaaccctccaaaaacaatatatatatatatatatatatatatatatatatatatatatatatatttgattaaaaatgttgaaataatatatatatttttatatttattatttcaaaattagaatacaaataagttgttacatccaa

SEQ ID NO: 223 - DNA, 194 bp, Glycine max
tgtgtggaatgcacatttagagaagagaataaacaaaatattgagaatatctaattaagagaatgaaaaaaaaaagaatatcactctctaagttgtctattctaatttatattataggaataaataaataataaaaaagtccaattaaattaattcctaataaaatttagcatatcaatcaacatcatcttgcg

SEQ ID NO: 224 - DNA, 180 bp, Glycine max
gtcgtgtttaagcatttgaaatattaaaataaaatgtttcaaagaatagtatattattataatttcgttttgacttatgaataatgcttcaaaacagagagttgtgtttattattattattctttctatttggaaatatctactaatggatcagaatagaatagatgtccttcggctttc

SEQ ID NO: 225 - DNA, 410 bp, Glycine max
ggctttccggataagagaagctttattttgaacctagaactgtctagatgaaaaagttgatgatgtatcaagtttcttgagagatttacttaattttaacaatatttctatgaaaattatgtcaaaagctaacttttaattaagctatatatatatatatatatatatatatatatatatatatatatatatatatatatatatattcaccaaaaaaatatacatatcatttataatatttcgttttttattcattactaactaaaaataatttctactgttagtctgttacacaaatatcgagatatttcatttcattttcaaaaattaaattaaagtaaatcattttaataatttattccgacatctaaattaaaatacactcatttatctgtcatgatttctgtcgc

SEQ ID NO: 226 - DNA, 132 bp, Glycine max
tgttagtctgttacacaaatatcgagatatttcatttcattttcaaaaattaaattaaagtaaatcattttaataatttattccgacatctaaattaaaatacactcatttatctgtcatgatttctgtcgc

SEQ ID NO: 227 - DNA, 101 bp, Glycine max
tagaggaggcggagacagaggaaagagatgtttaaatcactctttgtctttgtttctctctctctcccgttgaagacctagatgacattcgacagaggaga

SEQ ID NO: 228 - DNA, 84 bp, Glycine max
gttaagttaattggccatgcatgtgtgtgtgtgtggtagtgagaagaattgagaaaaagaatgtggtctccaaagtccaaccaa

SEQ ID NO: 229 - DNA, 100 bp, Glycine max
agctgatgcgttacaacagctacctccgcagactcaacagcttcaaactccttaagacatccttcatcctcctcctcctcctctacaccctctccaccca

SEQ ID NO: 230 - DNA, 103 bp, Glycine max
gcgtagtcagaggaagcatgcgcgcatctacctacccacccttttcaattatgcatgtatatatatatctgagccactttgccacattcattcccaccctcat

SEQ ID NO: 231 - DNA, 124 bp, Glycine max
atggatgttgcaaagtggtttggaagggtgggtatatatatatgaatagatagacagttgaacttgaagtgggtaggtgagtactgagtagatgatgagcatgtttcctctaacgaattggctg

SEQ ID NO: 232 - DNA, 152 bp, Glycine max
ttggacttacgtgaaatgaatactaaagtcatcactttgattttatttatgcatcgagagctaacttttttaaatgaaaaaaaaattatatatttattattaatttaatttaaagtatattatacgttcaagagctaaatacatattcatcg

SEQ ID NO: 233 - DNA, 253 bp, Glycine max
acgttcaagagctaaatacatattcatcgacttattttaaaattgaagacttaattactttttgtcttgctacttatttatttaatttaattttttggtacaattactaataaagattcaatttgatttcttaattttaaaagcaatgaattttgattccttaattttcacaaaaggtgtcgttattatttaaaattaacgatggattaaaactgtcagctaatcataatcctcaaaaccgtgttcaatgacc

SEQ ID NO: 234 - DNA, 145 bp, Glycine max
tccacttgtttggtgctaagaaagtgtaatttgtggactcgttagaaaaataaataaataaataaatagtaaataaaagggtaggtataactacaactataagggaaaagtcaaaacagtctacttagttatgcggtacaccaca

SEQ ID NO: 235 - DNA, 125 bp, Glycine max
aaacaaatacctgctgataacatatatatatatatatatatatatatatatatatatatatatatataatgataaatatatacagtttatctcttgattttttatcaacacgttaatttaagtat

SEQ ID NO: 236 - DNA, 411 bp, Glycine max
aaacaaatacctgctgataacatatatatatatatatatatatatatatatatatatatatatatataatgataaatatatacagtttatctcttgattttttatcaacacgttaatttaagtatattagtatgaattattttaaattttggctacatatataaaactatgcttcttttcaattattattattgctttacataaaacatatttaaaagtaattaaatgaaataaatcaaatagaattgaaatcaattagtgatgtaatatataattttattaatgcattatacataaaacatagtactttatagtaatcaaatttaaaatacaataaaagttatgaatacattatacatgtaaatttattatcaaaatttctataaatttattatacccgagttgatgggt

SEQ ID NO: 237 - DNA, 419 bp, Glycine max
cccgagttgatgggtttttaaaaattatttacatgattgaaatacctttgacatctcatgtattaaaaattttgtttaaacttgatgttattttcatttcaataattattttaatatatatatatatatatatatatatatatatatatatatatatatatatatatatatatatatatatatatatatatataaatcgttgaaataatatcatattattagttaattgataattaaaattatagaataaaaattttgatacatcaaagactttaaaaaacaaaaataaaaatcaggtgtatatatcatgaatccaaaaattatttaagccatatattatttattcaatattttcccacttataaaaaaaaaattataacaagtaaagcatgttccttatatatcagagcctgtccctg

SEQ ID NO: 238 - DNA, 118 bp, Glycine max
cccaatctaccctccatcttccgtcaacccccctaacaatcatttcaacgccttttctctctaatcttgcaaatcttggaaattattattattgaattgggtccttcccgcactaatt

SEQ ID NO: 239 - DNA, 94 bp, Glycine max
aaatctcccttcccagaaattaggttttagtatttctttctttctttatttatcagcgattcgtggcaatttttcgaaggtagggtttgatggg

SEQ ID NO: 240 - DNA, 102 bp, Glycine max
caaggctttggagaacaaacatgacaagggaggaggaggaggaggaggagggagcgttgctgaatccgacagcgactccgaggaggaggagtacgaggacct

SEQ ID NO: 241 - DNA, 143 bp, Glycine max
gaatccgacagcgactccgaggaggaggagtacgaggacctggcccacaagcccattggccccgtggacccctccaagtgcaccgccgccgggaccgggatcgccggcggaaccgcgtgcgctccgtcctcctttgtggtggt

SEQ ID NO: 242 - DNA, 128 bp, Glycine max
tttacacgataattaatgaagagaattatatatatatataaacgtcatcattggatagaaacgatgtccttatcaaacttaacctactataccagccaagtatgaaaaacaaacaatcttggtcccgt

SEQ ID NO: 243 - DNA, 109 bp, Glycine max
ttcaaatgaaagaaataaacaactatttctttccttttctcatgtaaataaataaataaataagatttgttaatgagatttttaagtaaactggatgttagagattcaa

SEQ ID NO: 244 - DNA, 256 bp, Glycine max
gcaggtatttgtcaacagtaagaagtatatagtctacatgtcaaaaagagtttacatataaaggattaggtataacaacttttaagaataataaaagatgtaacttatagaaatggtttttctataactattaaaaacaactttttaaatagttataaaaaagtggacttaattattattattttaaggagaactcttttttttaccaatttaaggaggacttaactgatgttaataatgtgggcaaatggtattt

SEQ ID NO: 245 - DNA, 152 bp, Glycine max
aatttggcatgtgaaacctaaataaacaaatatatgtattaaaaataaaataaaatatttcgtaaaaatttaaatctggattatagtttatcaaatagatgattatgtaagttttccgatccccactctaaagttatcttcccaggcatacc

SEQ ID NO: 246 - DNA, 219 bp, Glycine max
aaattgaagcaccacatctaagtaagttttatccttacgaatactataaaacatgcatattttaaaataaaatagaatacttcatttaaaaaattttaaaagctgatacttttattttttatttgaaattaaggtttatacttttatttaaaatatgattatatatatatatatatataacaagtattaaaatgtaagcatctctataagcgagaattt

SEQ ID NO: 247 - DNA, 127 bp, Glycine max
acatgtttggtttgtacaatttaatacttttttattttgttcatgtaaatttttttgttttgttttaattcttacaaaatatctgtttgttttatttatttttttccttaaagtgtgttagataaca

SEQ ID NO: 248 - DNA, 279 bp, Glycine max
aaattcattcaaacacatgctaaaataaaagtttaaatactttttagtccttaatttagcttttttgtttttgtttttgttttcgttcttataaacattttttgttttgttttaatctttttaaattttttttattttatttttcatcctcaaaatgatttagataacaaagaaaaaaatattaaattacaagaaacaaaaaaatatataaacctaaaataaatataagagtaaaagatatttatttatttagctaaattgatctaaacacgcagaatg

SEQ ID NO: 249 - DNA, 279 bp, Glycine max; identical to SEQ ID NO: 248

SEQ ID NO: 250 - DNA, 279 bp, Glycine max; identical to SEQ ID NO: 248

SEQ ID NO: 251 - DNA, 112 bp, Glycine max
ttggctcttcagcacattaaaagtctgcaagctaacagtgtcagaggatatgaatattagtattattaacaataataataataatgatgaaacgtgtctgctaatgagattg

SEQ ID NO: 252 - DNA, 267 bp, Glycine max
aagcatctcccaccaaattggtaactaacaatcctgttgacaacaatcagatgaataatacctataatatccttcgttacagtaataactcatactaaaaaaaatatataaaattttaaaattatattagtctaaaattacatcacgtatactaaataaagttaaataaataaatttttacataaattaaaatattatcttcaaaatatgaacatctaaattaaattaacactaaaaatataacaaaaatgaccacatatgacgttt

SEQ ID NO: 253 - DNA, 193 bp, Glycine max
cgacgcaataatcaagaaaatcaaacatggtatcagtaattaattttaaataagattatatatatatatatatatatatatatatatatatatatatatatatagacaccccaataaaaatcatattaaaacaattataattcataatattcagaataaataaaaatattgaaataaatggcaacacctcatc

SEQ ID NO: 254 - DNA, 165 bp, Glycine max
tcaatgataaagtcctttggataatatatatatatatatatatatatatatatatatatatatatatatatatatatatatatatatatatatatatatatatatataagaaaacacattttcaagaatttttccactttatttcttgttctacctaagcaaacc

SEQ ID NO: 255 - DNA, 81 bp, Glycine max
tttcattactttgtctcttcctcgctagcgacaattcccaccaccaccacacccccaatctgactatctccttgtcccgct

SEQ ID NO: 256 - DNA, 128 bp, Glycine max
tccatagatatgaaatttgctgaaataataacttacactttaatatatatagagagagagggagagagagaaaattgaagtagcgacttattaattaaaatattctttctgagcaaataagtgagtgt

SEQ ID NO: 257 - DNA, 468 bp, Glycine max
tttaacggcaagaatcaaaatttatataaaaaaaattaagattgatcattttttttattgaagaactaaaaataaaaattttaaaaaattagagactaaaagcataattaatgtttaacaaagttaaagttgtaatggttaaaatactttatccataaaataagtggataacaactctatctttttctttctttctttataaaatatatttaaattgatgataaaaagtgaaataaaataggaaacaaaaattgatattttatttttatttttattactattagtagtataatagaaggataagtagtgaaatagattttctttcattttgttctattattggtctttttgttcctcttaatttaaaagatatgtaatggaatgggattttcatttcaccctattataaaataattaaataataatatttttcatttcatttattatatttcatcggattggttcatc

SEQ ID NO: 258 - DNA, 141 bp, Glycine max
tcacccaacatccaaactgggccatctataaaaactataagctgaactgagtgtgtgtgtgtgtgtttttatcattaactaggtgtgtttatttatctttatcaagtgtactagaatgtacgcatttatttcccgcactcc

SEQ ID NO: 259 - DNA, 161 bp, Glycine max
gcaaaggtgggtttgtaaaatgtcaattgtttgtgcaaagcaattaagtccttttttataatatatatatatatatatatatatatatatatatatatatatatatatatatatatatatatatatatgataacaatgcataaagaacaatcacgccatgt

SEQ ID NO: 260 - DNA, 338 bp, Glycine max
cctaccagtatcgggtcatttatataaaaagagtctgatagtaaattcaaacttcattgtataccaaaaaatatgtgtatgataagatttgaagataggtttaaatactcctataatatgtagtactactattaaatattaagtaattttttataagacattaattgcatttattttttcatataatatttatttataaagtgttaacaaaactataagaagattagcattacttaaaatcaaaatattacctcggattttattttatttttataaaaaacaagtaatgatgtattttacagtataaaggaatccttattaatgataccgagggcttt

SEQ ID NO: 261 - DNA, 266 bp, Glycine max
caacagtcagtacccaaggaaaatagctttggagtaccaattttgtatctagagaaacttataatatatattttttttatcattaacaagtaactttagcatattgattaaaaaattaaaaaatatttattactaacataattacactttttatccttaacttattattattttattattattgtttttacaaaatttctccaactttttaatttttttacaaattttactcttaattttttttgacaaatttcatccttaacttt

SEQ ID NO: 262 - DNA, 97 bp, Glycine max
aagcttcatggccaagtccaagccacccgggttgtggaatacgtccgacccggtggcccggcccggcccaactgaggatagcctcacatcatgcact

SEQ ID NO: 263 - DNA, 99 bp, Glycine max
aaggtcaagagggtttggttgtgtgttgttgttgttgtaagaaagtgaatgcatatatatagaatgatgagtggtgtcataagtgagggaccatggaat

SEQ ID NO: 264 - DNA, 281 bp, Glycine max
gggtcgtaccaaataaacggttagaaacgatcacttcctaattgaagtaacataaatattttttaagaaaattttattgtccattttacaaaactcttatttaattattcttttgtattgattattttcaattaaaatatccttaattgttttagtccataataataaatgttataaattatctttttatctctcttatgaaaattgaatatattaatttaaaaattgaaactcattgttattattattattattattctctctccacactttaattaatt

SEQ ID NO: 265 - DNA, 116 bp, Glycine max
gcctcatttctcattggatccatcctataaggcaggtatactttaaattcgagtaaaatatatatatactcacaagttcacaattaattttcgtgtatatcaccagcttgcatagc

SEQ ID NO: 266 - DNA, 214 bp, Glycine max
ttggagcatccaacatttttattggtacatccagtagttttttaaaatgccaaaattatccttatttatattttaaaataaaataattaaaatttaaaaaaaaaactcatacagatcataatccttttaaaaaaaatcaattttaaaattttcaattatttttttataactaattaaaaaataaataaataaattcatacgaactgatgatccg

SEQ ID NO: 267 - DNA, 126 bp, Glycine max
cgcagggttagatacgtgtcttagttattattattattattattattattatatgtcgaagtcatacttagttatgatagctagctaactcttttattaactataataattggctacacgttgcag

SEQ ID NO: 268 - DNA, 152 bp, Glycine max
tggccctgatggtactcgcttctctctctctctctctctctctctctctctctctctctctctatatatatatatatatatatatatatatatatatatatatatatatatattgtctgataataaaaaaaaatgttgtgcatgttcaatga

SEQ ID NO: 269 - DNA, 148 bp, Glycine max
cctgatggtactcgcttctctctctctctctctctctctctctctctctctctctctctatatatatatatatatatatatatatatatatatatatatatatatatattgtctgataataaaaaaaaatgttgtgcatgttcaatga

SEQ ID NO: 270 - DNA, 110 bp, Glycine max
cttaatggccaattgctgaaagtttgaatcaataattaaaagtacatacattcaaaataataataattaaaattacatatgatataaatgtgcattctgaattctaaggt

SEQ ID NO: 271 - DNA, 106 bp, Glycine max
ggaccgaaccatgttcttaattattattatatatatatccatgaaatatattttttttgcctcctaattaaattttctacttctatcataaatttggccataagcc

SEQ ID NO: 272 - DNA, 115 bp, Glycine max
caggatcacgaatgaaacatgaaggaaggaaggaaggttagaactattacgactaaggtcagacaaaataaaggttgggagaaaatcccaaaatgaaatgttgggagaaagtccc

SEQ ID NO: 273 - DNA, 311 bp, Glycine max
tcactttgtagcaagaccttttagttaagtctataaatttacttgtaaataaattaataagccaaaaattatatgtaaataagcttatttaatcctttaaataaattaacaaatataatctcaaaatattataataaaattttaatataatataataacaaaatattattatttgtacttattaagcttaactataactcttaaaaaaacttatttaatatatagataagttcaaacttcaaatttaaaaaattaatcaactcaaggtttgttaagtctatccttaacatattccaacttatttgcaccca

SEQ ID NO: 274 - DNA, 102 bp, Glycine max
ccgctacaaagtgaccattgtaggaggacaagaatcacaagatctctctctctctctctctttcacatgaataaatagaagaaagagagaacaacaatctca

SEQ ID NO: 275 - DNA, 237 bp, Glycine max
ccgctacaaagtgaccattgtaggaggacaagaatcacaagatctctctctctctctctctttcacatgaataaatagaagaaagagagaacaacaatctcaatatacacaaaactatgtatatctatatgtacatataatatataatatatgattttgggggaagtacttttttctttgtgtgttctgtgttgttgttgttgctatggtatgctattcacaaagcaagagccgtta

SEQ ID NO: 276 - DNA, 143 bp, Glycine max
acaaagcaagagccgttattagtctctagattctgggttttgttgtttctctttgtttaccactctgcttcttttcttttcttttcttctgttctctctctttctctatcaggttatgggtatatgtttgcgtttctgtgctt

SEQ ID NO: 277 - DNA, 158 bp, Glycine max
tgtgcttgtgtgttgtccgtaaatatatatatatctcatcattattgttagtgttattggtcatgtgtttctttttctttattttttttctcactttctatgctctttctctctattcctaagggggctgatgtgctgtttttgcgttcggaagttac

SEQ ID NO: 278 - DNA, 232 bp, Glycine max
tttcatgggaaagataaacatataagtttctcaagctaaaaaataattattgtgattaaaaaatttatcatgatactcttattatatcatttaatttaatatgataaataattaaaatttaagggaaagttctattaaatattaacatacaaatattttattcttaatatatatatatattctcaatcaaacatatttttattagagattaatccctaactctcaagtgagt

SEQ ID NO: 279 - DNA, 150 bp, Glycine max
gccttgatttgaaccacaaattttttaagtataatagtaattgattttttaaattttaaaatattattatatatgtcatgtataataataataatttaatataaatgaatagatgaacatgtttaaataaattgagtcggatttgacaaa

SEQ ID NO: 280 - DNA, 183 bp, Glycine max
aagaaccatgtgaggaaggcagggaaaaaggcaaaatagagtacactttaatttcaacctgaataggtaagaataaataagaaaaataaaaaggatttgtggttttgcacaatatatatatatatatatatatatatatatatatatatatatatatatatatggattcaacaaggctatcaa

SEQ ID NO: 281 - DNA, 124 bp, Glycine max
cagccaattcgttagaggaaacatgctcatcatctactcagtactcacctacccacttcaagttcaactgtctatctattcatatatatatacccacccttccaaaccactttgcaacatccat

SEQ ID NO: 282 - DNA, 104 bp, Glycine max
atggatgttgcaaagtggcttggaagggtggatatatatatatagaaaagtgtgggtaggtagattaaggtagatgcagtgcatgcttcctttctctgactgcg

SEQ ID NO: 283 - DNA, 157 bp, Glycine max
tgtcacgaggaaattatttgtttttaataccaagtctgattgattgatttgtctcatttatcatcttgaaaacattccaataaaaaataaatgttttaaataaaactgtttttaaacaagagattcatgatttttttgcaattcagatatcctgtcc

SEQ ID NO: 284 - DNA, 120 bp, Glycine max
cgcacacatttgaaggtatgaaagtaggtagaatattttgtcttcttcttctatgggcgaaacttgaaaacttctaaaaatacaattttaccattaaattaaaatggtgtgcccatactc

SEQ ID NO: 285 - DNA, 157 bp, Glycine max
ggacaggatatctgaattgcaaaaaaatcatgaatctcttgtttaaaaacagttttatttaaaacatttattttttattggaatgttttcaagatgataaatgagacaaatcaatcaatcagacttggtattaaaaacaaataatttcctcgtgaca

SEQ ID NO: 286 - DNA, 104 bp, Glycine max
cgcagtcagagaaaggaagcatgcactgcatctaccttaatctacctacccacacttttctatatatatatatccacccttccaagccactttgcaacatccat

SEQ ID NO: 287 - DNA, 97 bp, Glycine max; identical to SEQ ID NO: 218

SEQ ID NO: 288 - DNA, 409 bp, Glycine max; identical to SEQ ID NO: 219

SEQ ID NO: 289 - DNA, 409 bp, Glycine max; identical to SEQ ID NO: 219

SEQ ID NO: 290 - DNA, 132 bp, Glycine max; identical to SEQ ID NO: 221

SEQ ID NO: 291 - DNA, 155 bp, Glycine max
aatagcgtgattggaaccctccaaaaacaatatatatatatatatatatatatatatatatatatatatatatttgattaaaaatgttgaaataatatatatatttttatatttattatttcaaaattagaatacaaataagttgttacatccaa

SEQ ID NO: 292 - DNA, 194 bp, Glycine max; identical to SEQ ID NO: 223

SEQ ID NO: 293 - DNA, 180 bp, Glycine max; identical to SEQ ID NO: 224

SEQ ID NO: 294 - DNA, 404 bp, Glycine max
ggctttccggataagagaagctttattttgaacctagaactgtctagatgaaaaagttgatgatgtatcaagtttcttgagagatttacttaattttaacaatatttctatgaaaattatgtcaaaagctaacttttaattaagctatatatatatatatatatatatatatatatatatatatatatatatatatatattcaccaaaaaaatatacatatcatttataatatttcgttttttattcattactaactaaaaataatttctactgttagtctgttacacaaatatcgagatatttcatttcattttcaaaaattaaattaaagtaaatcattttaataatttattccgacatctaaattaaaatacactcatttatctgtcatgatttctgtcgc

SEQ ID NO: 295 - DNA, 132 bp, Glycine max; identical to SEQ ID NO: 226

SEQ ID NO: 296 - DNA, 101 bp, Glycine max; identical to SEQ ID NO: 227

SEQ ID NO: 297 - DNA, 84 bp, Glycine max; identical to SEQ ID NO: 228

SEQ ID NO: 298 - DNA, 100 bp, Glycine max; identical to SEQ ID NO: 229

SEQ ID NO: 299 - DNA, 103 bp, Glycine max; identical to SEQ ID NO: 230

SEQ ID NO: 300 - DNA, 124 bp, Glycine max; identical to SEQ ID NO: 231

SEQ ID NO: 301 - DNA, 100 bp, Glycine max
ggaatggtagtggcagtggtatgtgtgtgtgtttgcgtagtagcaatggagtatggagtaagagtgacggagggggaagagtatttcaaaccgttcaacg

SEQ ID NO: 302 - DNA, 98 bp, Glycine max
ccggaatccactatccacgcgccactcccgaggtcaatttaatttaatttaactcatcatcagtcatcaactaaaataacactaacatgcaaccacaa

SEQ ID NO: 303 - DNA, 76 bp, Glycine max
tggtggttgagaaggagagtttaagggttgaagggaggaggaggaggagggggagaggtcgtgggtttaaatcctc

SEQ ID NO: 304 - DNA, 220 bp, Glycine max
ccagttgcattctcttcgtaaataaaccagtgtagttagtataaatattgtaagtacttaagccaaacatttgtgtattttcattcaataggttctctcattctctctattgtgtgtgtgtgtgtgtgtgtgtgtgtgtgtgttctgtgatatggattcttatttctggtattttggctctttaacctttaaaataattagggtaagcaacaaagaacac

SEQ ID NO: 305 - DNA, 127 bp, Glycine max
tccatgcattaaagcaaacatctagaattagaacttcatgcactttatctattaaatctttgcaaaagtatttgggagatagatagataagataggtttgtcgtgattttcagggacaagtattcca

SEQ ID NO: 306 - DNA, 125 bp, Glycine max
tgatgcacatcgcaatccaaaaaaattaaaaaataaaataaaattagatgaaaaaaacaaataaagaaagaacttaagaaatactagaagctccatctatcagccaagtaacaacccggtatccc

SEQ ID NO: 307 - DNA, 113 bp, Glycine max
agcaccctgtctaagtgcaatacgattaactcttaaggtaacgatagcttcttgatagcatgttattattattatgtaataataacatgctttttggtcattattcatggtgg

SEQ ID NO: 308 - DNA, 263 bp, Glycine max
ccaaggtaaggcacacaaacttgcccccaggctttaaaactctcttcacctgaaaataaaaaataaaataaaataaaaaataaaaaagccaagttaccaaaaatacaaaatagtcaatccatataaacattcattatttagatcttgtttgtataaacttctatataaaaacttttagggggaagtaaaaagtaaaatacattgagcttctcttataagttaaaagcaggctagacagatttctattatcaccggattggatg

SEQ ID NO: 309 - DNA, 104 bp, Glycine max
gcatctgtcacgaacgacggcctgcagcgaggagttctcgcagagaagacgaagctgctgtcgcgaagaagaagaaggcgtcgcgaggaagaagaaggcgtagg

SEQ ID NO: 310 - DNA, 114 bp, Glycine max
aaaggtgggtgtgcttcccatttatatatatatatacatacatacatacattctttctcaaaactcttctttaatgcttaaaaggttgtccttttatggtttccagaggaaaga

SEQ ID NO: 311 - DNA, 107 bp, Glycine max
ggtgtgcttcccatttatatatatatatacatacatacatacattctttctcaaaactcttctttaatgcttaaaaggttgtccttttatggtttccagaggaaaga

SEQ ID NO: 312 - DNA, 164 bp, Glycine max
tgattcaatggtttgatatgtttcttagaaagaaagaaaaaattgttgtaaattttagtacagtttgatactaaaactataatagtaaaatttataataaactagaaaatatactggatcttgtgttttcttactatttatgtcagacattgtcagcctgcaaa

SEQ ID NO: 313 - DNA, 133 bp, Glycine max
ccctctatcaagtgtatcagcccttataaataccatgaatgaatgaaataaagcaaggaaaaagtttatcagtatattcttatagcagtagcagtagaattagctaagtatagaagttcaccctatcagtagc

SEQ ID NO: 314 - DNA, 92 bp, Glycine max
gtgtcgaatggcatcaagtgatccatgtagctgacctaacttagtaggataaagctttgttgttgttgaattgagaatcaaattgtgcacag

SEQ ID NO: 315 - DNA, 107 bp, Glycine max
ttgttgttagggtttgcagactgctgcggcggcggcgggtgtcgatagccgccgcggaactggaaagggtggccgtacattcgcgggaaaaataagaagcgaaggcg

SEQ ID NO: 316 - DNA, 149 bp, Glycine max
aacatcagcatcattacggggttttgtttagtactaatgtaattgtaaattttgtcatggcgcggttcggcttttcataaataaataaaaataaagtcctcttgaaacacaactaaaaacacatggagatttttcttcatgcacccacc

SEQ ID NO: 317 - DNA, 271 bp, Glycine max
tcaaaccaaattaatgtttcatgatttgatttagtttgattttttcaattttactaaaatgttatttcattaaaaaattgtactttttaaattacattaaaaaattgttaataacaatttatgaaacttattaatatgttaaatcttctataataaaaatttgttaaattttttatcaattttaaaccaaacatattttaaagaagtcatctgaaaaaaaatattatatatatatatatatataacactacgaattactgtgaaactcaaa

SEQ ID NO: 318 - DNA, 142 bp, Glycine max
aaagaatcgatttggattgatttttagtttttattaatatttttttattttagatcaattgaaaatttgaatacctttaacattgaggtgaggtgagatttggatagtttaactttgacttatttactcatccaggtggagt

SEQ ID NO: 319 - DNA, 123 bp, Glycine max
tcctcagccttagtttgctgagagatgtttgtgtgtgtatattatatatatatatatatatatatatatatatgagaattgacagatagtacaaaaaatagttcatgatgaaggctacagcct

SEQ ID NO: 320 - DNA, 102 bp, Glycine max
tgcatccggtcattctaatgatatattatttcatcccacatcctccccactaaacaaccttctatgttgatctctctctctctgtctggcctcttgagtgtg

SEQ ID NO: 321 - DNA, 83 bp, Glycine max
agcgtagcgtaccatgagtttgggtctgaatctgaagaaacgctgcgtttcgtttcgtttgggaatgagtgacgatagaatgg

SEQ ID NO: 322 - DNA, 83 bp, Glycine max
catgtttcactcgcaatgattgttttattttattttattaggctttgatattggaagtttgtatggatacgcccttagtatgc

SEQ ID NO: 323 - DNA, 176 bp, Glycine max
aaagcgttctcaatttctttaaaactttgcttttttatacaaaagaagaaaatggtaaaaataaataaataaatcaaaatataagcaaacttttgaggttctattttacagtgtaaaatgtaaatttaatcagaagtaaactttttatttatttatagggattgatttagggagtt

SEQ ID NO: 324 - DNA, 180 bp, Glycine max
aaagcgttctcaatttctttaaaactttgcttttttatacaaaagaagaaaatggtaaaaataaataaataaatcaaaatataagcaaacttttgaggttctattttacagtgtaaaatgtaaatttaatcagaagtaaactttttatttatttatagggattgatttagggagtttaga

SEQ ID NO: 325 - DNA, 120 bp, Glycine max
cccttcccttgcactaataattaatgaactttaattactattttttcaaaccaatatttgggcagtaattttcacagaccaatcaaaagagagagagaaagagaaagtgcatagcatttc

SEQ ID NO: 326 - DNA, 172 bp, Glycine max
gaatgatgtagcaaataatttatgattaatatcaaattttgcatatataatatctatgtaatcaaataataaattttaagaaaatattatcatatatatatattatttctttttttgctagaatcttgaacacaatacttttccatgtaaaagtgcaaattcgggatagtga

SEQ ID NO: 327 - DNA, 114 bp, Glycine max
aattcatcgcaatacttcaaaatttaaaattcaaattcaaattaggatgaattaaatataagtaataatattatttaaaataaataaataacatacctttgaaatcaaattaaa

SEQ ID NO: 328 - DNA, 124 bp, Glycine max
cgaacaggccacaagtaagtagtaataaacaaaaaataataaataaataaacagttcgcttctaattcattttcatgataaatgcagttacattcatctcccctccccaattccatttccttcc

SEQ ID NO: 329 - DNA, 103 bp, Glycine max
ggatcgaactcatcgtcttcgagtgagtgagtgactgatcagggtctcaagctcttcatcgacccctcttctgattttctcgggaaaatgacgggagagaagg

SEQ ID NO: 330 - DNA, 168 bp, Glycine max
aaacaatttacatggtgacatattatcattattattattattttattttaagaaatattcaaattaaagttataactaaagattttgaaaatgatagtttgaaagagatattgaattaaattaaatggtttagtttacattatcttatctcaaatgttgttagaaacg

SEQ ID NO: 331 - DNA, 263 bp, Glycine max
tctcaaatgttgttagaaacgtatctaaaatttaaagataaaatatatatttaaaatttatttttgatatatatatatatatatatatatattatttgaatcaacaattttttttaatctcttatatcttttaatttattattttcactttaatcgtaaatttaattataatttatatttaaaaaatatttttatcatgaatttaattataaatttatttattataaattttatgcattttaattgtttatgcatttcacagg

SEQ ID NO: 332 - DNA, 101 bp, Glycine max
gcatttatcattgaattagagggattatttaccctaataataataataataatatggtagcggtgttgttggcatctgcattttctacccgagaaagcaaa

SEQ ID NO: 333 - DNA, 119 bp, Glycine max
ttcttgaattgaagtttacgttattaaatgtaaaaataaaataaaattctaggctgttaaaagtattttggaaagtgttattgttttcttttctaaattgtatccaaggtggtttgagg

SEQ ID NO: 334 - DNA, 133 bp, Glycine max
gcaatcaacaatccgtgttgataagagcaaaatatccttttattatttatttatttgatagtcaatatacatattttgcctcgcacccattaaagagttggggtcataatgtaatttcgggactagaagtgct

SEQ ID NO: 335 - DNA, 108 bp, Glycine max
cccatggcttaacacaaaaatcagttcccaaaaactagtgtcttccactgaaaaacttatatttaaaaataaaataaaattgtcctttcttgttcttcaattgcacga

SEQ ID NO: 336 - DNA, 124 bp, Glycine max
aaagagtcatgtcaaatccttctactatgtaccttgtatcttcttctttgtctttctttctttttagaaaacatcgagtaaaattttgatgggctaaattttacgtgattgagattaatttaca

SEQ ID NO: 337 - DNA, 109 bp, Glycine max
gctttgcttggttggtaaaggtggagagagagagagagagagagagaagtgtttagagaaaaaatggaaaattatattatggtgagttgagggaatagaagccgctttc

SEQ ID NO: 338 - DNA, 204 bp, Glycine max
cccactgtctctccttctctttggtgagaaaataaacacctaagaaaaataaaataaaaaattttatattttatggctctcaacttttctcaacttttattatttaagttttattttcggaagttttatcattaaaatttttaatttttgtatattgtattataattgataaaaataaatattttaacatcggtttaggtataa

SEQ ID NO: 339 - DNA, 260 bp, Glycine max
cagctacggtcaatctttgatttttttaatagagaaacattttttttacatctattattgagtgaaccttataataatttattctttgacatttattattgagtgaactaaatgtaaatgtcataaagagttactgaataagaatatatatatatatatatatatatatatatatatatatatatatataatatacattcttaacatttaatgttcaacaagttaactgaataataatagaggtacctactcgcctcgga

SEQ ID NO: 340 - DNA, 258 bp, Glycine max
ttatcacgcaaccattcatgttacaaagttgtttttataatcgaaagaggaaactaagaaaaattactttcatgtaagttataagttagtttcataaactgtattaatgaggttattataattaataaactgacaacagagtataaattaaaatatctttatttatttatagaaattctctcaatacaaatgtttgtatcataaaataacataacaggtagatcattcctctgatgttattgagattagcttgggcag

SEQ ID NO: 341 - DNA, 129 bp, Glycine max
aaggccaaccctgacttcagtgccccgtagccagcgttgctccttgcctcgcaccacaatgttcatcatcatcatcatgctcccaactactattaacactagagaaaccacttttgctgcccttcaaca

SEQ ID NO: 342 - DNA, 419 bp, Glycine max
ttgaatacggattataagctaatttttaaataataataaaataatttttatataaaattaattaatatattattttagatattaaacttttaatattttttcatttagtttattgattttttactatacatagattcatatgatatattacattcattaaatctaataaatacactatatttagtaaatataaaatttaataatattattaatgttatttatttattaaatacaataattattactatgtaagaaaaaatcactttcaaatatgttttattggctaatttttaagtaaaataaaaatagctaatattttaatatatatatatatatatatatatatatatatatatatatatatatatattcatatattaactttggttaaaagataatctcattctcgaaagtctaaa

SEQ ID NO: 343 - DNA, 419 bp, Glycine max; identical to SEQ ID NO: 342

SEQ ID NO: 344 - DNA, 352 bp, Glycine max
aatctcattctcgaaagtctaaaattcataagactaaccttaagatgtagaaaatataataatttttaaggactgtttttatttaagaacatattttaataaatatttacatattactaattgtaataaatttattttaataatgtttttaatgtttagtatatattattatattatatttaataatattgtaatcaatagtcaatacaatataagaaaaaatctatttatttatatgtctatgtaagttatacattaatagcatttaatgttatattaatgtatattttcaagttgattttacttgtggatataaatataaataaaggtagtaaattagcatcattggctt

SEQ ID NO: 345 - DNA, 202 bp, Glycine max
acgaccgtgtctaaacgattaaaagtgcaaaaaaaaaaaaaagttggccttatcaaaattaaactatcataatttatttatttattaccactaacactatatttattatatttattacaaacttaaatacatttacggtactttaaccgattattcaggcactctctctttaaccaatgaaacttaacacccaaccaaatgg

SEQ ID NO: 346 - DNA, 89 bp, Glycine max
ttggtaggttcgatgttgacatcttttacagtatataagtgttcatttatttatttagtcgtaccataatgagattaatttggcattga

SEQ ID NO: 347 - DNA, 94 bp, Glycine max
gcaactacctgcaacgaggatactcacacaatgtgtagttatagccaagagtttttcttttctttttttcctattaggagaatctcgcgtaatt

SEQ ID NO: 348 - DNA, 113 bp, Glycine max
taggagaatctcgcgtaattacataattacattttctcataatatgacttaatcttgatttttaaatatatatatataatactctctatatgactgcaaatatataaacattt

SEQ ID NO: 349 - DNA, 312 bp, Glycine max
tcatcgtgttctaggttaggagtttacaccatgacttcttattttaagattactgcctatatagtgttagtgtaaaacaaattacaatgtcgatcaataaaaaatcaacattaatgtacttttttaaagtagttttttttataaagttcagtaaattgatcatatattatgatttatgatggaataataataataataactataataaaataattatatagtgatataaaattatattttatcattagcatatcatttatttttcttaaatttaatctaatatatttttacataattacatgtgtcaatcaa

SEQ ID NO: 350 - DNA, 112 bp, Glycine max
acatatgttattcagcttagattttcttagtaagtcttgttaattgaattactgatataataatttctaaataaaataaaatattatatcgattagcaccttggtagttggt

SEQ ID NO: 351 - DNA, 161 bp, Glycine max
acgcaaacaataagcattttttttaaataaagtttgttaagtgcgagttttaatttatttatttatttaaggtaaaataaataaatatttttttaaaaataaaaatatttactaatcatgatatcttgttactatattattggatgttcatgatttaatct

SEQ ID NO: 352 - DNA, 161 bp, Glycine max; identical to SEQ ID NO: 351

SEQ ID NO: 353 - DNA, 137 bp, Glycine max
ttcaagggaaggagaagaatagattttttttataagagatgaaaaaacgtgaagaatgaagtttagagagtgagatacgttagttagttagttagttagttagttagttagttaggaaattgagatggattaaagga

SEQ ID NO: 354 - DNA, 351 bp, Glycine max
ggctgcgtttatttctcagtttgtttgggctatgatttaatgggactaaaaatttgtgagaattattaacctctaaaaattattttttagaattcaaattaaaaattataagttcagatttatttgaattattatatcattttacaaagataaattttaaacatttttatatttatatttatatttataattataatgataagaaaaatatattttagtttttattttactagcttaatgtgttttttctatagattttttttatattatttatttattaattaggtgtatgactatgaaatatatgttccaacagcaacttatagtatatgatcctgatccaatccttga

SEQ ID NO: 355 - DNA, 256 bp, Glycine max
gcgtttgttacttcacacgcacacataaaaaaaaagtgtgattatttctttgttaaaatttatctaaaagcattcaataaattaaattaaacaatcatttttcttaatatagcagcaatcttagtatagaattgaagttaaaaaaagtcccttaataagggaaaatacaattgcacaacaaataattctctaaccaatcaaattttatggcacacttgtacgtaagtctgaactggttttccaagacatgcttgct

SEQ ID NO: 356 - DNA, 110 bp, Glycine max
gagtcaacccacgcagtgtcatcatcatcatccaagttgactttgactgatctgagcataaacatgtcaagaataacaaatggggcttctgaaacgtaggagaggccatc

SEQ ID NO: 357 - DNA, 107 bp, Glycine max
caggaacaaagaagccattctacagcaaaatcgctctctctctctctttcagcttagagttttaccttatcttctataatggatcatggaaagcacttcagtggcag

SEQ ID NO: 358 - DNA, 128 bp, Glycine max
ggtgaggagtatggacgatacataaatgttagttgcgaacaactctctagtctagtctagtacatcatgtttaggttggattagtatttaggaaagtcaacacacaatgcatgttgaggcagcaagag

SEQ ID NO: 359 - DNA, 143 bp, Glycine max
agttggcaaatcgaaccttttatcaacacacacacaaaaagctgcaactaagaaatggagaaaaagttatacgattcaaaagagagaaaaaaaactattatgctgataaaaaaattggagtgaattggacttaccagtggagc

SEQ ID NO: 360 - DNA, 86 bp, Glycine max
gttcatgggtcaaaccaacccaactttgaaggcaaaggagagagagagagaggtcaagggttttcttttttccgatttgttgatcg

SEQ ID NO: 361 - DNA, 125 bp, Glycine max
ccaggaccatgaccctattaatgaaaaaacctgggaaaaataaataatatataagaatatatgtaagctccaggtccaaacaaacaaaccaataataagttaataacatcagagaatgaccgcaa

SEQ ID NO: 362 - DNA, 222 bp, Glycine max
ttgcatctccctgctttattttgactgtaatgtgttgaattgtttatagtttctttactttcaatgccaatatatatatatatgcttataatcttctgtcaaaatgcttctaaatctatgtattttatgactttgttaactatataaaacatttctaattattatcatgaatctgacaattaattatacagatcagaaaacgagtcttctgattcaaatccc

SEQ ID NO: 363 - DNA, 91 bp, Glycine max
gatcccatccaccacttttgtttccccatccacctgtacgtccaccaccaccaccatacccaggacgataatcatttctgggtgcagcata

SEQ ID NO: 364 - DNA, 273 bp, Glycine max
agcatcaatttgcattcagtgtgaacattgcttttgttttgtttgttaaatttaaacccctttctaactttcatcagttcagaataatgttttgcccaaaattgttgttttcagttgataccctcccctccaatgtcttacatttttcgctgattttattttatttccaatttgtctttcctcagattatgttaagtcccaaataatgtcttctaagagagcctcatcagttacagttagttgtcttttgaagttgtgcaaaggatgttgctc

SEQ ID NO: 365 - DNA, 99 bp, Glycine max
catagcgaagcctcctaaacgctttggtttcttcaccaccaccacccttctttctctctctctctttctaaaaaccagaaacaacaaacacaaaccgaa

SEQ ID NO: 366 - DNA, 122 bp, Glycine max
tttcttcaccaccaccacccttctttctctctctctctttctaaaaaccagaaacaacaaacacaaaccgaaaaggcgaaaggggttttccgagtgagatctagggtttccatcgattcgga

SEQ ID NO: 367 - DNA, 101 bp, Glycine max
aaagtcgccaggtctgttcttttttaaatcatgaccttcctgttagtagtggattatagattagattagatttaaaatcctattttggtaatcggaggcat

SEQ ID NO: 368 - DNA, 211 bp, Glycine max
tggaacaacctcttcacccctcaaagactaatcaagctgaatcaagtaaaagattatatcattttattattctcatataatcacacacacacacacagaaagtatatcttgacaagacacataagtaaattttgatctttcagctatttttgtcaggttaggaagaatttgaaaagaaaagtagtagaagaaaatgaaagcttggaacagc

SEQ ID NO: 369 - DNA, 281 bp, Glycine max
tagcagatcaggcaggagatatcagaaaatgaaaccaaagtaaccaaaaatgggtatttataaagtgaaaaacaacttttcttccataatggtttatgcatatatgaaacaaagtgtgtgtatacacacacacacactcatctgcatctgtatatattttattcacttttctttgtttcttttgtttttatttattgaatcacttgaggtgaatcaaattaattgaattttgttaacattttttattttaacttttaagaaattcattcaccaagtgaggg

SEQ ID NO: 370 - DNA, 180 bp, Glycine max
gcggtaaggagtgattgagaaaagaatcgatttttttttgtgttgaatcgtaaaggagtgattttttttctgtaaacttttaagtgtattttttttttcagaacaacgatttcttcttcttcttcgtttgcaattattgattcctctatctaacaattttgatttgggttgaatcttggt

SEQ ID NO: 371 - DNA, 115 bp, Glycine max
ggtagtttccatgctccatagtagaaacaattaagtactactagtgccttattatttcacattattattattattattatgtagagtttggaaaatggtaagcagtagcactcag

SEQ ID NO: 372 - DNA, 121 bp, Glycine max
aagaactgaggcggctatgtgagacttcctaacaaaaatttccttaaaagtatctcttatctaattttatttgtttaaattaaaaataataataattagaatgcatggtcttagaacgatg

SEQ ID NO: 373 - DNA, 126 bp, Glycine max
agggagaaaccattcgatctcttccctatatatatatatatatatatatatatatatatatatatatattatccaacttagcaatatatatgtataaaagataattatgaacacaccaaatgagtg

SEQ ID NO: 374 - DNA, 194 bp, Glycine max
tttgagctatgatggcttgatgaattagaatatccaatcattttacaaaagaatccttctcaaaaagctttctgcttttaaattaaaatttaagataaccaattaatatatatatatatatatatatatatatatatatatatatatatatatttaaaataaaaacctttttttagttcttcgttacaccaaga

SEQ ID NO: 375 - DNA, 105 bp, Glycine max
ggttgaggttctgcaacaaattaaatcgatcaaaagaaaagaaaaaaaaaagtcaagtttgtaaagcatttgtgaaacactaagttttaggttcgatatgctccc

SEQ ID NO: 376 - DNA, 100 bp, Glycine max
ggcgccttaacattacaaaggagggaattcagtttccttccattgttgttgttggcgatcaatcttcaggtaaatccagtgttcttgaatctttggctgg

SEQ ID NO: 377 - DNA, 117 bp, Glycine max
gtgcaggccagtctcttattttgaagaagaagaaaagttccatgaagccatgtaatggaggccattgaaatggagaagcataccgattacacatgtaaccctgagtttgtgcaggaa

SEQ ID NO: 378 - DNA, 221 bp, Glycine max
tttctcattcagccgtgtatcttctttgttaaaataacaaatccaggaacaaaaaatttatagaacttataactcaagttattaaactttatgtgcttgacaaaatccaaattggatacagaaaaatatataataaataaataaaatttagcaattgacttaaaacaggaaaagaaatcgaaatcaaaaggacaaaaagaaaaaagaatatgccatgcaca

SEQ ID NO: 379 - DNA, 336 bp, Glycine max
agtcgctcctctgtcctttcttttggaaaaaataatttttgcacattttttgcttacagttactagtctgaataaaaaaatttaagcatatttttcttttttagattcaaatcttgaaataccagttttttttttttgtgtctcgatcaaaactagctatactatctataaataaataaataaataaataacatgtatttaaggataatcttttttacgtgttttataagtacgtttaaatatagaataaacaagtaattaaagagctaaaacatgtgatggctttataatgaagaaagagtcgattaaaagtataaaatgatgtgtattcctcgg

SEQ ID NO: 380 - DNA, 202 bp, Glycine max
ggtcctgccggataaatactagctttaagttatttattatatatatatatatatatatatatatatatatatatatatatatattcataaatttgatggatataatgttaatgagtatgcatgatatcctattaaatcattgcacattaaaaaaaaaagaacaaaaactaaagaaaaaacagatataaacggatcggaaacg

SEQ ID NO: 381 - DNA, 350 bp, Glycine max
gcactaattagcgtgagttgttttagtttaatcagtgatattgagtttaggttatggaaatgtaattgtattaagtattaaaatgaaaaattttatcgtttataataatttaatctgattcaaataaaattatcttcagtaatacatatatatatatatatatatatatatatatatatatatatatatatattgtttaaattaaaaaaaataaattattgataaaaaattgtctttaaaataattataataattaatatgttagatttaatttagttgtacgtatatatttaaagtaaattgtgactgtagtcatacgtatgtttacaaaagtatcggttgaacacaca

SEQ ID NO: 382 - DNA, 115 bp, Glycine max
agctctggtaggttaggtttcaaacactttgatattctgaatttccttctacaattttctcatcttttttgtttttaattaattaatttaaattcttgtttaatttctcatgttg

SEQ ID NO: 383 - DNA, 106 bp, Glycine max
cccatctcctgctaaggtaacactttattcaattttcaactagtataactagagagtaataggaagaaaagagagagagagagaggttggtatggaatatggatca

SEQ ID NO: 384 - DNA, 98 bp, Glycine max
tgcatcactttggatgtgattttgctctaaatgtggatttcagacgtggaaccaaacacgcttattattattatcgtcaaaatccacacaccacattt

SEQ ID NO: 385 - DNA, 230 bp, Glycine max
caaagggacccaaaggtactatataggaatctcatctgaaaataatggataagaaattgatacactctctctctatatatatatttatatataaaattcacacatatacatcacttttggctagacaaaaagaaaaagaaatacatgtaaattcctgtgaatatgataatacaatcataggaaatttttggattaattccatttgtattctaaacaagaagcattgctga

SEQ ID NO: 386 - DNA, 123 bp, Glycine max
gcgcctaatcagatggtacagtagttcatcatttactatcattattattattttatttttcttattttttttaatgtaactgatatttatattggtttaccattgtcatggtattattattgg

SEQ ID NO: 387 - DNA, 140 bp, Glycine max
gagtcatgttgaagctgatgtagattttgttaaatcactttttatttatttattaaagttatcctacccttttattcattttcagttgagttaggtatataaatcaacatgtaagttatgtaaaatggcaggttacgtat

SEQ ID NO: 388 - DNA, 140 bp, Glycine max
ggaactgacaacattaaccagattaggccaaaatttaaaaataatacctattaaatgtgataatatataatgtactgttagtccatgtcctatcattttagttagttagttagtgcagcggttatgtttgtcattgaatt

SEQ ID NO: 389 - DNA, 122 bp, Glycine max
tcagtgatggatagataacaggtgataattttttttattaatttatgaataaaaatataaaaaaaatatatactaaaaaaatacttcttttatatatatatatataaacactccgtgccttt

SEQ ID NO: 390 - DNA, 95 bp, Glycine max
gaatgccggaattgtgtccacaaattgtggatggatagttggttggctggctggatggctggctggatggctggctggatggatggtgaatggct

SEQ ID NO: 391 - DNA, 200 bp, Glycine max
atgccaagagcctaattttacatcattaagtatttaaaaatgaatggtttttttatagtccaacacaaaaatttatgatatttttgggaatcaaaaacatttaaatttttatttatttatcattcatattttcatataaatagaaattatgtattttttttttctcagtttcaggggcacgggatgggtaggagacagag

SEQ ID NO: 392 - DNA, 191 bp, Glycine max
tgattgtcatgtgacggataaatagtgacaaactgataatggttaaaatcgtaaaatgaaattttataggaaccaatactgaattttttttataggaattaaaactatataaggagtatattacaaagataaaataatatatttaaacctataatatatatatattcctttctcaatggaaatttcttcgt

SEQ ID NO: 393 - DNA, 227 bp, Glycine max
cggatgttaatttgttagaatgttagtttttgtttgaagagattagtagtaaaatccaatatatatatattttttatctaaaagttacctaaagttgattcaatcaaaataaattctagacccataataaattcctaaaggtagaaatagaatcaagcatatgcatatttacttaaaatcacattagctggtattttaacatggcctatagacaattcaacgtggga

SEQ ID NO: 394 - DNA, 97 bp, Glycine max
cctgggaaactcatttcattagagtgagagagagagagagagagagagagaggtatcacagtgaaacgaagaagccctaactacgcacgcactcatt

SEQ ID NO: 395 - DNA, 114 bp, Glycine max
aaacttagccgcatttcacgaaaaagatccaatgcttcaaccagcttgtcttgtcttgagtatccttctatcattgcattataggatactacatttatagcagccacaaggtca

SEQ ID NO: 396 - DNA, 241 bp, Glycine max
gggcattatatcacgagttaattaaggtgatttacccaaaatgtggtacatctcgagaattttttatttaaaacaataaaacttaacttgaacttgaaaaattaatcctaacaaaatattagaataaagtttatatatatttatataagctgtgcttttcaaatatatatatatatatatataaaggttttggttccaatttagtgttgtaaaaccatgctataaatcatctattggccca

SEQ ID NO: 397 - DNA, 178 bp, Glycine max
agggactgcataagcaactaaaggtaattttcttttctttttttaaattttggaattggatgttatatgttcatgttataatatgcaaaatgtgaattaggtagtcaaagattattttgcaagtttttgacgtcctcattatgatatttgtttttgccttgtaatctggtggctgtgg

SEQ ID NO: 398 - DNA, 114 bp, Glycine max
aattgaggagagggcaaggtagtgattgcagagaaagccatcggagtttagagagagagaaggtcacacacaaacacgtgctttgcttcaaatttcaaccatcgtgttcgtgtc

SEQ ID NO: 399 - DNA, 113 bp, Glycine max
accatgtttgctcagtttgaattaaaagaaagaatcatctagcttggtttggtttggcttcaatgtaatccaaacaaaagacagaaagaagacatgaggcttgaaagatagca

SEQ ID NO: 400 - DNA, 196 bp, Glycine max
tggctttgctttcacgtacgtaccaaaaatcatgattttggttgttgccttttttggatgaggactagtaagtaagtatcctagaatctatctatctatctattgcgcgtgttttaattgttatctatctgtgaaggagttaacaaactaaaaacgtggatcagttaaaagatttgatgcgtactttctgctgctt

SEQ ID NO: 401 - DNA, 120 bp, Glycine max
aatgcatacaaggccaaaatcttagatttctaggagccaaaaagatctcaaacccttagcttatttcaaaaggccaaaatatatatatatatataagaggttagaggaagcaagatgcaa

SEQ ID NO: 402 - DNA, 105 bp, Glycine max
attgccgaccctttctatttgttcaattttttcaatacataataataataataataataataataataaaaactggtctaattaatcacacttcatctgacaagg

SEQ ID NO: 403 - DNA, 138 bp, Glycine max
tcccttgtgggagaatttattttcaccattgtatttaaacctaaggtggagactttttcttttctttttatttgttctttatgccttttttttcttttttcaacttaccatattcttccttggttacattctcctccc

SEQ ID NO: 404 - DNA, 140 bp, Glycine max
atatcgatcccactgcaatttcattagtgttattgtgcgctatccttatatatatatatatatcttcattaaataggtttattcacaattttccagtctaaaaaaggtttattcataattaagcaacaagatcaaagcct

SEQ ID NO: 405 - DNA, 105 bp, Glycine max
agccaattgcaacaacatttaatttatgttctgtttattgttgaatgttgatgtgtgtgtgtatatatactggagaacgaagtgttgtaatcggagttgggttga

SEQ ID NO: 406 - DNA, 185 bp, Glycine max
actgtagtgaaatgtgtgtttgatatgaatacgaaaatgagatgaattgttttgaaaaattcaaatttagaaattggttttgttttgttttaggaaaaggatattgacgtcaaattcaaaaaatagataaaaagataagtgataagtcgtagagtttttgacaaagaatgagggaaagctctcaa

SEQ ID NO: 407 - DNA, 134 bp, Glycine max
ttcttcatcacccttggattttttagtagctctgaaagtgtccactcaattgctgtagctgaagtatccattgaaccagccaacatatcctttgcaaaataaataaataattttatgtgccaaagaagagtgag

SEQ ID NO: 408 - DNA, 98 bp, Glycine max
ccaagttcagctgtttccatctctctctctctcctttgtgcagccaaacgctcttcaaaactataaaaaatattaaagttgaagagctcaaggtcaga

SEQ ID NO: 409 - DNA, 125 bp, Glycine max
aatgttgctcgttgctttaagagaagctgtaatttggtgttcattatatatatatatacatatatgataagatgttaaatgcagaatatcatcaattaatcatttacatcactgcctgcagctac

SEQ ID NO: 410 - DNA, 276 bp, Glycine max
tttaatttgacaccaccaaataataattcagatagtgtcaaaattattgtttcgttaattaaaattacatatatatatatatataaagtaatttttaatttaattttataatttttttaaaattaattttatattttaatactattagctaaaccaactaattttttaatattgataaatctattaacttagttttataaaaaatcggtgagagtattttttttcctccttaatttatttatattatttagttttatcgttggcataagatagaca

SEQ ID NO: 411 - DNA, 123 bp, Glycine max
gatcggttccctggtctagctaatcagcaacgaaattaagctttatcataataaaaatactatttatattatattatatatgatatgatataatatataatgggggaagggacatgatgaact

SEQ ID NO: 412 - DNA, 211 bp, Glycine max
ggctctcacttccttggtaaaaaagcctaaaaggtgatccccttttcaattttcaaattagaagttcatcttgcccccccccaccccaccccatccgaaaagtgtctttttcttttccccaatatattttgtcataatgtaattgtcatttaatttgacatggttgttgactaaagtgagtaataaatttttattgtatgagctgcagtgg

SEQ ID NO: 413 - DNA, 302 bp, Glycine max
cgaccctggtaacaatcttacgacatttaatttaaaataaatactactctcttcatcccataatatgtcttcttatattttttttacaaaaaaaagttaataaataaataaaagagaatgacaattttataaaattaatttttttattattaatttatgaatgattttgttactgatcggttttgatattataaggaatataagtggaaaaaattaactttacattaaaaaattaaataataataattttatgatttttctcttacatgatgaagatgaagtattgtgcaggtgttgtacaa

SEQ ID NO: 414 - DNA, 124 bp, Glycine max
cggtgaacgagaaagagaagaggattcagacgaagatttgattgggttggtgtgtgtgtgtgtgtgtagtgtcttgaaatggttttgggacgatggtggcagaaaattgaagggatgaacgaac

SEQ ID NO: 415 - DNA, 134 bp, Glycine max
ccagatgctcggacctatcttctgactttgaaggaaataagagtcaagtgtgtgatgatgatgatctattctcttctctttactctcttcattttgtaactagatgtgatgattgatatgtaaagtgtgccctt

SEQ ID NO: 416 - DNA, 78 bp, Glycine max
aatactttgcgaaggaagcccagaggaagaagaagaagggagaaggggagttctttgaggcagagaaggaggtgggat

SEQ ID NO: 417 - DNA, 302 bp, Glycine max; identical to SEQ ID NO: 413

SEQ ID NO: 418 - DNA, 193 bp, Glycine max
aaatgtgataacgcaataaaaatataaatacacaagcttgtaaatttaattgacattttatccattaagaagtaagaaaacagaagaaaaaaatatcaaactaaaattaacataaatctcaacatataataaacaaattattattattaaattatataaaacaaaatgcaaatatataggcgctgtggtactg

SEQ ID NO: 419 - DNA, 104 bp, Glycine max
cctcttcttggttggtgatatgaatatcctcctttgtggggaattgctttttttattttttttccttctttcttttcttttctgcatttgaatgatgcaggtga

SEQ ID NO: 420 - DNA, 102 bp, Glycine max
gtaccttgaaggcatccttttgatcttcggataactcctcctcctctgtgagcttatcagtaaactcctgcaaaatatagaacaaatgagcgtaagaggcct

SEQ ID NO: 421 - DNA, 112 bp, Glycine max
caaagaattcgccctctcccttcttcttcttctgggcttcctttgtaaagtatttgtcatcaaactgttcgacattaacagcagagacatttgctttggttgaagtgccaat

SEQ ID NO: 422 - DNA, 145 bp, Glycine max
tgtgtccaagagacaaacactttcaattatacttgggagacaaataaaattgagaaaacagaaaacaaacaaggccttagtttttatttatttattttgtaatacacttcatttatggtacatttacacaagaatgtttctgctg

SEQ ID NO: 423 - DNA, 115 bp, Glycine max
atccatcaacgggtcagccatgcgattaaattattattattattatatatatataccatctatttaaagagataactaaactaaataatttataatacggtagtgcctttgtggc

SEQ ID NO: 424 - DNA, 142 bp, Glycine max
aggagtttggaaggatcgttcaaagaaaagcctaatacggaaaactatattaatatccttctagatattattatttttagtataaaaaccattggctaatttaactcactctcatatatatataaaagggccaaatgctcta

SEQ ID NO: 425 - DNA, 133 bp, Glycine max
aatgcacaccacaacacatctagaacccttctacgctttagaagacatatcatgtgtcgatgaagtaaagaagaatgaagagagagagagaaaatgtcaatggagaagctcgggtcgatgaagaacgaagacg

SEQ ID NO: 426 - DNA, 149 bp, Glycine max
ttgataacaatattccaactaacctattttttatatactttcaagtaaaataagttgaaagcaacaattaaattaaattaatattgcacaaaattttaagaggaataataataataataatgatacactaaaaggcttgctattgataa

SEQ ID NO: 427 - DNA, 98 bp, Glycine max
aagttgaaagcaacaattaaattaaattaatattgcacaaaattttaagaggaataataataataataatgatacactaaaaggcttgctattgataa

SEQ ID NO: 428 - DNA, 212 bp, Glycine max
aagcaggtaattccatttgaaatttatcaaattgggatatttttttaattaatcatttgagtaagtagtaaaaaaatttgcttgaaaatgaaaacgtaaaaagatttacgtttttattttatttttttcataatgaagtcataaaaaattaaacaattttaatttttttaattacttatataaagtcataaattttcaccatttcaaactcg

SEQ ID NO: 429 - DNA, 149 bp, Glycine max
tttcatgatttggatttgttttaatatggtttttattagtgtgtaaatatatatatatatatatatatatatatatatatatatatatataattttattttaaattcattatggatatcatagttgatttttcatgttaccgtatcggc

SEQ ID NO: 430 - DNA, 124 bp, Glycine max
aaagtcattgtctcattcacattttttcaattatccaatacaaaactctgcttgaaaaatttgaagttatctctacataaaccaaccaaccacatagtacacgtttgaaaatccgttgggaagc

SEQ ID NO: 431 - DNA, 99 bp, Glycine max
tctgcttctgtaaccaaatgttatttttaattgatgcatgcatgcaaactcacaataacatgctttgctaagtgagtgagtacgaacttgcggacaata

SEQ ID NO: 432 - DNA, 130 bp, Glycine max
acattaagcaggaccgataaaagtagttcaaaatgatgagaaacatttcataaataaataaatgagaacatgattttcataatcagctagctttcttttgttttcctattgttttgggttgaaggaacat

SEQ ID NO: 433 - DNA, 156 bp, Glycine max
cttgatcctgaacccaaaaaatcaggtaacttaggctttgaacaaatgaaaccttaatatgttttacacttctcaattttacctctttcttttgtgaatgtgtgtgtgtttgtgatctcaaaattactgtcataagctttctaaactccaagtgaa

SEQ ID NO: 434 - DNA, 123 bp, Glycine max
gctttctaaactccaagtgaaaatataaataccataaacaaaaaagtcgataaataaataaataaatatatatatatatatatatgtatatgtgtgtgtgtatatacacatgatgcaaggaaa

SEQ ID NO: 435 - DNA, 123 bp, Glycine max; identical to SEQ ID NO: 434

SEQ ID NO: 436 - DNA, 123 bp, Glycine max; identical to SEQ ID NO: 434

SEQ ID NO: 437 - DNA, 101 bp, Glycine max
aatgaaggagagaatgtgctaattttatgatgataataataataataataattcattcgaaggggtgaagtgagcgacctcaaggcattggagccagttgt

SEQ ID NO: 438 - DNA, 172 bp, Glycine max
attgattcacagcgatggtatctctgttgatgttccttttgattgatacatatatatatatatatatatatattgttactcaaatatagaaattatttttaattgagaacccaatatatattgtatagtttacaagctgtatatttttacagatttgcatctcgtatgtgca

SEQ ID NO: 439 - DNA, 109 bp, Glycine max
tcccacacttggtaatcgtatactttctactttctagagcctcctctcctaagtcctaagagattcttaacctctctctctctctctctttctctatggcatctgcgac

SEQ ID NO: 440 - DNA, 174 bp, Glycine max
aagtgatgtatgactgaatgaaaacgaaatgtttaaaaattattttgttttaaaataaaatttaatttatcatagcgtacgttaaaatacataagggtcagataaattagcagtcaaaataaaactgtttataaatgaaaataaaataaaataatcaaatcaattgcaagttca

SEQ ID NO: 441 - DNA, 134 bp, Glycine max
gaggtccaaggtgcatactaaaattatcacttgatattaaaataggttttccaatcaggatattcaacacttttaaaaccaacaaatacttctcagcaaaaaaagaaaagaaaacagagtatgccaggaagcaa

SEQ ID NO: 442 - DNA, 114 bp, Glycine max
atgcttgcagtggacaattttgatgaattgaattagtgaaagttatttaagtatttggcaaatgtgaactatttgtggaggaggaggaggagaaagggaaggaaataaggtgca

SEQ ID NO: 443 - DNA, 241 bp, Glycine max
tgcacataaataaccaagacagataaagagatcagatctatttacttggactacagtacaataggtacaatctccctctctctctctctctctctgtgtgtttgtgtgtgtgtatatatatatatatatatatatatatatatatatatatatttatttatttatttatttatttatatatataattgggattttgtgcttgtgatatcattattacagcatattgctttcaaatttggct

SEQ ID NO: 444 - DNA, 174 bp, Glycine max
caatctccctctctctctctctctctctgtgtgtttgtgtgtgtgtatatatatatatatatatatatatatatatatatatatatttatttatttatttatttatttatatatataattgggattttgtgcttgtgatatcattattacagcatattgctttcaaatttggct

SEQ ID NO: 445 - DNA, 149 bp, Glycine max
tctgtgtgtttgtgtgtgtgtatatatatatatatatatatatatatatatatatatatatttatttatttatttatttatttatatatataattgggattttgtgcttgtgatatcattattacagcatattgctttcaaatttggct

SEQ ID NO: 446 - DNA, 149 bp, Glycine max; identical to SEQ ID NO: 445

SEQ ID NO: 447 - DNA, 199 bp, Glycine max
tccatatgttcattcgaaactaaaatttgataccacatgttaatctataacaatctacacattaatgttatatatcttttaataatttaaatatgaacttattattttaaacaaaaaaattattattattaatgatcttaaaccaaaatgtaatcccaaattaaaaacttcataccccatattgtacgcagctttaccc

SEQ ID NO: 448 - DNA, 98 bp, Glycine max
tacggcaacatttcaggttcccattctaaccaatgatcccatcacgttttatatatatatatatatatatatataatttttcctctgctggtgttgtt

SEQ ID NO: 449 - DNA, 97 bp, Glycine max
taattcgtttgcctcgttatgactatggatatttttgcttggatgaaattgttattattattattattattactattatactgttgtcgtcgtcgtt

SEQ ID NO: 450 - DNA, 131 bp, Glycine max
tcgaaggatgctctggtaattattattatttttttctttctttctcgtcttaaagattattacagttctaaaagtacaatctaattattaaattaagaagcagagagatttaatgtgagaaacaagcagca

SEQ ID NO: 451 - DNA, 131 bp, Glycine max; identical to SEQ ID NO: 450

SEQ ID NO: 452 - DNA, 113 bp, Glycine max
ggcagaggcaaattacaattacagttacgattcgaggagtaaggcgttgggtgtgtgcaacaagcagcagcagcagagagagagtgaagagttggaggaatacgaggagcaag

SEQ ID NO: 453 - DNA, 100 bp, Glycine max
tctggttgctccagaggggtatcaacggaagaagtggtttatgaggaagaagaaagcaagaagaagaagaagggtggtggtggtgcaggcggaaataata

SEQ ID NO: 454 - DNA, 110 bp, Glycine max
tgaggaagaagaaagcaagaagaagaagaagggtggtggtggtgcaggcggaaataataagaagcatttaagtggagagaaagagaaagtgaagagaagggtggtggatg

SEQ ID NO: 455 - DNA, 187 bp, Glycine max
catagccagtgcaagtcccggccctcccctttcctattcttttcttcttctccaactcaactcttattctcaactcaactcatctctttttcttgaaattgacattcttattttgagttttggatttgttttcagaatagttattccgtaagggtataaatatccttacggaatgacccttcgagaa

SEQ ID NO: 456 - DNA, 145 bp, Glycine max
ggagaaggaggaggaagaaaaaaaaagagaaaagaaaagaagggtgaaggagttacttacctacgaagaaggaggatgagggatcgcaaaattgaagagggggggaggtgaggggggggaggagtcaccgtaagaggaaagggtg

SEQ ID NO: 457 - DNA, 165 bp, Glycine max
tcaattctgcacaacacgctttcctttacttatttattttctcttaatcggattttctactttttcaaagagataagctattttggcatcaatttttacaaacacttgttcataatatatatatatttttttttctgtttcttttccattgtattgtatcactca

SEQ ID NO: 458 - DNA, 141 bp, Glycine max
ggactcttcaggtgggtataactatgatatgatgtagtgaaatactataatttacatgcaattgcgttttaattaattaatcgtgccaatgaataggttggggttccttgtggattttctgtctcatgctgctattgttgg

SEQ ID NO: 459 - DNA, 333 bp, Glycine max
ttgtgggtcatgtcctttatagagaaagaaaaaagaaagatctattaattaaccgcatattacacatactgcactagctcgtgagatctagtcttcccatagtaacagtataaaaaactcatactaatgtaactggattacagtataaaaaaaactgttttatatggttaaaacataggtttttttttcttttgttgttatgcaacttttgtgtgtgtgtgtatatatatatatatatatatatatatatatatatatatatatatatatatatatatattctgttttttttaaaagaaactgtataaggataatacggaaccaataacaccc

SEQ ID NO: 460 - DNA, 333 bp, Glycine max; identical to SEQ ID NO: 459

SEQ ID NO: 461 - DNA, 104 bp, Glycine max
gcaaggtttgagaaagcacaatattaaactagccactggaagtgtaactgtgtgtgtgtttattttattttattggggaagatgctttaatacgcaagaggcaa

SEQ ID NO: 462 - DNA, 104 bp, Glycine max; identical to SEQ ID NO: 461

SEQ ID NO: 463 - DNA, 82 bp, Glycine max
tggctaggcaagtactgaacagtttattttattattatattattatggtagatttggtgagcattgacacctcaggaattgc

SEQ ID NO: 464 - DNA, 100 bp, Glycine max
atttgccagcgatcaacaaaaccaaaacgtgaggcctttcttctcttctcttcctaatcgccaattgaggcctttttctgaatgtggcatatccatgttg

SEQ ID NO: 465 - DNA, 126 bp, Glycine max
tgtggcatatccatgttgtcacttcttcttcttcaccttagtaatgaatgagaatgcttgagtagttgttgaagtggtggttgcccttgtgctttacacaacaatcccttcacactttcggtcacc

SEQ ID NO: 466 - DNA, 110 bp, Glycine max
ggttcatgcgaacatcatccaggctcctgcttcataatagtcatagtatatatcatatatagaatttaattgaatatatatatatataatccttcaatcatgaattatca

SEQ ID NO: 467 - DNA, 97 bp, Glycine max
ccgaagcaagcatatcatatgccgcaaattgtatcaattaattaattatccatgtatttgttcccaacgggttagcattttggtttgggaattgcta

SEQ ID NO: 468 - DNA, 111 bp, Glycine max
tttagttaattagagcgtcatgttaataacctgagctattaattttaaattaatttgtaaaacatttttcaacaaaaaataaaataaaaattcctatgcgatccttatggg

SEQ ID NO: 469 - DNA, 102 bp, Glycine max
gtgttctgcgaaggtgacatgagaaagagaaattggagggaagaagagaagagaggagaggagagaactcacttgaggaggaaagagagggatctggaaacg

SEQ ID NO: 470 - DNA, 115 bp, Glycine max
tgtgttcgccatattgaaactgaacagagggagattttgggagagaaggggttactgaaaaataagaaagatgagaagaagaagaagaagaagaaggaggttgaatagcggtagg

SEQ ID NO: 471 - DNA, 89 bp, Glycine max
ggaggttgaatagcggtaggtagagggagtttggtgggatggggtggggtgggttggtgaaactcttcttcaccttcacattcatttca

SEQ ID NO: 472 - DNA, 264 bp, Glycine max
aatctcacctggttagtcaaatattaagtgcactattgttgttgttattattattattattattattattattattattattattattattattattattattattattattattattattattattattattattattattattattattattattattattattattattattattattattattattattattattattaaaacagaggatatttaaacttttatttatagtcaaattggggacagaactccaaatattga

SEQ ID NO: 473 - DNA, 155 bp, Glycine max
cactgtgccattatgcaaagaagagagaaagatgtaaccgagagagagagagaggtgtttgaaggaaatttgaattatatgcttacaatttcattttttggtatatatatattgatagctaagtaaggtccaagtcagaaatagagggctagcaa

SEQ ID NO: 474 - DNA, 102 bp, Glycine max
ggtgtttgaaggaaatttgaattatatgcttacaatttcattttttggtatatatatattgatagctaagtaaggtccaagtcagaaatagagggctagcaa

SEQ ID NO: 475 - DNA, 116 bp, Glycine max
tctcagtctcagacacacgcgggcgcacatatatatatatatatatatatatatatatatatatatatatatatacttgactagctagtagctaggcatggttgagcttgggttaa

SEQ ID NO: 476 - DNA, 109 bp, Glycine max
cctttagctccacggtttggaactgcttcttcttcttcttgtggtggtggtggccactgcccattagatcagacaagtactccagtgtgcctccaactcccatttctga

SEQ ID NO: 477 - DNA, 109 bp, Glycine max; identical to SEQ ID NO: 476

SEQ ID NO: 478 - DNA, 276 bp, Glycine max
tgaagcaagggagcatacatatatatatatatatatatatatatatatatatatatatatatatatatatatatatatatatatatatatatagcacatagattgatcattttctaactttgtacaatgttttttacaacattattattattattattttatatctctctgtccctttaattatcttatccgagactcttttctgaaacaaaaaagaagtagttgcatcgaacttactttctttcttaaaaaataaatggattcgttccttacctt

SEQ ID NO: 479 - DNA, 275 bp, Glycine max
gaagcaagggagcatacatatatatatatatatatatatatatatatatatatatatatatatatatatatatatatatatatatatatatagcacatagattgatcattttctaactttgtacaatgttttttacaacattattattattattattttatatctctctgtccctttaattatcttatccgagactcttttctgaaacaaaaaagaagtagttgcatcgaacttactttctttcttaaaaaataaatggattcgttccttacctt

SEQ ID NO: 480 - DNA, 130 bp, Glycine max
tggattcgttccttaccttctaataataataataaataaaaaaacgttgctctgctctgcgctgtggagaagttacatactacgttcgagatcttttacttacagggagtcacagacctacatgcagcct

SEQ ID NO: 481 - DNA, 173 bp, Glycine max
tcagtttgtttgcacttaatttacaagtacatcattacaaacttaacctcttttttttttcttttcttttggctttcctgttacctattttactagtttcaataattggtttccatatatagaactatataacactgttacccttttatttatttattcatgtcgctggactc

SEQ ID NO: 482 - DNA, 111 bp, Glycine max
tttggctttcctgttacctattttactagtttcaataattggtttccatatatagaactatataacactgttacccttttatttatttattcatgtcgctggactcatagc

SEQ ID NO: 483 - DNA, 135 bp, Glycine max
tgggaggattaagacttggtggagaattgaattgaatgttgtaggtttaagttgtgaaaacatcaacgaaaaaaatattgtgaaaacatcttataatatataaaatgaattatttcattgagttgaataacttgt

SEQ ID NO: 484 - DNA, 115 bp, Glycine max
ttggtgctagataaataatctctgttttcataagaaaaataaaataaaattatcctcttgtttattagctttgattagtcaattatgctttttaacgaaagctaacataacagca

SEQ ID NO: 485 - DNA, 116 bp, Glycine max
tttaggtgggagcatgaaccgttcaaattaacctcaaggacaacaacaataacaaattaaactttattattattattattattattactacaatgataatgtgaagaagaagaacc

SEQ ID NO: 486 - DNA, 173 bp, Glycine max
tttaggtgggagcatgaaccgttcaaattaacctcaaggacaacaacaataacaaattaaactttattattattattattattattactacaatgataatgtgaagaagaagaacctatagttttgtaaagatcaaaccaattatatgttcttatcgggttctctattgatga

SEQ ID NO: 487 - DNA, 124 bp, Glycine max
tggaagagacaaagcatcattgattcattcagatccaatatagtaagtaagtaaggtatgagtggaagtggagtatggttaagaagatgaatgaatgtcgaagaattcagcaatggtgtgagtg

SEQ ID NO: 488 - DNA, 117 bp, Glycine max
tcagcaatggtgtgagtggaatagaagaagaagaagaagaagaagaaggtgcacatcacaatcacatgcatctatgtatgggtttcgtagaagataagacgacacaattggaagagg

SEQ ID NO: 489 - DNA, 150 bp, Glycine max
caatccaattctcaacataacattaaaataaaataaaaaatctatataaacatttgataatgaaaaaaataaaaataagatgatattttaataactatatgtaaaaatagaaaatacttcgactataatattggatctcctttgaacatc

SEQ ID NO: 490 - DNA, 97 bp, Glycine max
cagattgacggattccagacatgtattaagttgttgttgttgttgttttatcagatatagcatatttttcacaagaaataatcttgttggaacccaa

SEQ ID NO: 491 - DNA, 118 bp, Glycine max
tggactctggacttggagataataatataataataagaaaacatcaaaatgattgaaaacatgcaaccgaagtttatatttttatattaaaaaggaaaaaccaagaaagcaatcagca

SEQ ID NO: 492 - DNA, 76 bp, Glycine max
tggtagttccaagatgtgcccatgctataccattttttctaaaataataataatatttatcatatgcgaccagcat

SEQ ID NO: 493 - DNA, 174 bp, Glycine max
tgagactattgttgtaaatggagaaaataaaataaaaaatattgttgtaaatattttttttgagaggaaaaaatattgtaaagatatgttatataaatagtttaattaaaccagtaacttttcattttgttgatcaaacttcattaaattcataagggtaagtctaaaggtggg

SEQ ID NO: 494 - DNA, 109 bp, Glycine max
aagcacggtctattcagaagctaagattaaatgcatgcatgcatgcaggtttgtttgtcaatattcttcgagacactaacattggtattactcattagcaccatttcgc

SEQ ID NO: 495 - DNA, 177 bp, Glycine max
agcatttcatgtcattcctcaactttaaaaataaaataaaaattggagctaaaaaatactactacaattgcaacacaaattttcatcaaaaataaaaaaataaaaaattacaattttctttttcagcatgccacgaaggagaatagtgtatgtaatatatgtacgaggtacggcttt

SEQ ID NO: 496 - DNA, 116 bp, Glycine max
tccattgtcttcctcgtgtatttttctttcttcttttttttacgcattttactgttccttttctctctctctctctctctctctctctctctctctatgatttgggacctgcagtg

SEQ ID NO: 497 - DNA, 117 bp, Glycine max
aacttaatcgtccaaatcgtatatattccattagattctgtataccacattacattacattttttttatacaaaagaaaagtaaatacattgcttttaaaacaatcaataaccgaaa

SEQ ID NO: 498 - DNA, 80 bp, Glycine max
aacctggaagttctttcctaatttcaattaataataataattacacaaataaatgtttgcagaaatgtagctacgcccgt

SEQ ID NO: 499 - DNA, 205 bp, Glycine max
tgaacaagtaagacactttggatgaatttcatccaaaacacttgtagaacaaaaaataaaataaaaaatgattttttctcataagctaaaaaaattgttaaaaagttaaaattagcttttggaaaaattaatgaaaaaattttactttgcattttagttattagagagtttttttttctcttattttcttctgcaaactgtaagc

SEQ ID NO: 500 - DNA, 111 bp, Glycine max
cctgtgtgcattcattgtttcacaaagaaaaagaaaaagaaaaattgtcgtgcgtgcgtgcattgaagaattcatttagcatttagcaagaactagaagccaagccatgac

SEQ ID NO: 501 - DNA, 246 bp, Glycine max
ttggtagagaagccaaggtattactattaagccccatataaaataaaccaattcagtttattttaaaattttggaaactgaaaattattacaaaaatattttttaatttacttaatttacttttaaataccattttaaaacttttttacactcaatttttaaaaacattttttattttattttagttcctataaaatcttacaaacacgtttagtccttacattttttccattagcaatattgtcc

SEQ ID NO: 502 - DNA, 102 bp, Glycine max
cctggaccaccaacatttttctttctttcttttcttttaaacgatatagatcttaacaaacagactctctaataaagtgtacgtgttagggaaatatgttga

SEQ ID NO: 503 - DNA, 94 bp, Glycine max
aaagtgtccagccacaaacggaaaatttgtacgttcccatacagttattttcaaaaaattaaataaataaattatagcataccaccgaactgtc

SEQ ID NO: 504 - DNA, 121 bp, Glycine max
ccaccgaactgtcaatttgtattaaattaaaaaaaaatatttatttttatttatatatggtcataaattatatttgtcgtccgatttgctaataataataaaaaattgtcgtccgactaaa

SEQ ID NO: 505 - DNA, 116 bp, Glycine max
tgtgaaacaaaggcatgttatattctcatacttctaacagatataagtttgatcaactgtgattgggaaaaggtgaaaggagaagaaagaaagaaaagattgcggatttgaatcct

SEQ ID NO: 506 - DNA, 151 bp, Glycine max
aagggcaaatccaaagatatattaaaagagggggctttgaatttttatttttaaatgtctaattctaataaattattattattaaaaatattaaacacacaaaattaaaactaatttttattttaaatgataataaccttaaccaatatca

SEQ ID NO: 507 - DNA, 143 bp, Glycine max
aaacaacacatcctgcaaatcttaaagtatgcaaaatcaagtataaataaataaaaataaggcgtacttttaattatatttatttataaaaataaaatacaaacataattcgttttcttattaggttcgttagaatggaactg

SEQ ID NO: 508 - DNA, 100 bp, Glycine max
cgttgcaacaatgaatgacaccaaccacaccagagtccagaggagttgatgaatgaatgaattgtttaagcagagaagaagctgttggaagcagccatag

SEQ ID NO: 509 - DNA, 93 bp, Glycine max
tcaatagcagccggtagagatcctgcatccattttgttaagagaaatgaaccaaggacacaataataataatagaagcacccaaattgagaca

SEQ ID NO: 510 - DNA, 234 bp, Glycine max
aactattgaaagcaaacagatttttttttgtaattaaagaataaacataatataacttattaattattaattatacatataaaaaagtaatatgtaaatactactattaaataacatatatatatatatacttaattatactagtaaaatccatgttaaatacgacagtactaaatattcctcctaatcatttttttatgataatactattatattacagggcgctacataaac

SEQ ID NO: 511 - DNA, 123 bp, Glycine max
aacacaagtgccttctcgaacccgaaaacgttatcctgtaaataataaataaataaaactaaatgatatcaccatatttagatcttctgcaaaatcatgacagtagctgatcttctttcccaa

SEQ ID NO: 512 - DNA, 107 bp, Glycine max
ttggagaagcagcaatttacaacgttagatcatgaaagaaaagaaaagaaaggtgaaagtagcgaaaagaaagcagggtagaaagagaaaacgtggaattagcgaga

SEQ ID NO: 513 - DNA, 95 bp, Glycine max
aacgtggaattagcgagaattgaagaagaagaaggtttgagagcttaccaggaaggaagatctggagacgaatgaggtggatctgaaggtttgga

SEQ ID NO: 514 - DNA, 251 bp, Glycine max
aaataaatctctcgcatcttaaaataccattttaatgtatcacattttgtctatatttctaaattaaattttaatattctttagatttaaataattatacacaatttttttttataaatctaaaatatatatatatatatatatatatatataaaataaaattataagtaaattcatacacaatttaacgactttaattaaattttatttctccttctcaatcattatattatcacatgaaactactggca

SEQ ID NO: 515 - DNA, 196 bp, Glycine max; identical to SEQ ID NO: 400

SEQ ID NO: 516 - DNA, 99 bp, Glycine max; identical to SEQ ID NO: 431

SEQ ID NO: 517 - DNA, 145 bp, Glycine max
cagcagaaacattcttgtgtaaatgtaccataaatgaagtgtattacaaaataaataaataaaaactaaggccttgtttgttttctgttttctcaattttatttgtctcccaagtataattgaaagtgtttgtctcttggacaca

SEQ ID NO: 518 - DNA, 147 bp, Glycine max
gaagggaccgttgtaagggtgcggctggtgatcgaacggcgggagctgcggcggaggagacgcgacgatgtcggcggcggcggcgggtcggagagaggaaaagcacgcgcgtagcttggcgattgcaatggttctcttgagtggcct

SEQ ID NO: 519 - DNA, 116 bp, Glycine max
gcgaggattgtgagcatatatacaaatacaactcagagagagagagagagaaggcgaatgcatgtgtgattgtgttgtgaaactgaaatttggtggcgtttgttgagggagggaat

SEQ ID NO: 520 - DNA, 91 bp, Glycine max
tcctggaacatttcttcatcataaaagaaaaaaaaaacatgttatctaaacacacacatgtgtgtgtgttttttctgaacacagacgtgtg

SEQ ID NO: 521 - DNA, 185 bp, Glycine max; identical to SEQ ID NO: 406

SEQ ID NO: 522 - DNA, 101 bp, Glycine max; identical to SEQ ID NO: 437

SEQ ID NO: 523 - DNA, 199 bp, Glycine max; identical to SEQ ID NO: 447

SEQ ID NO: 524 - DNA, 134 bp, Glycine max
ctcactcttctttggcacataaaattatttatttattttgcaaaggatatgttggctggttcaatggatacttcagctacagcaattgagtggacactttcagagctactaaaaaatccaagggtgatgaagaa

SEQ ID NO: 525 - DNA, 105 bp, Glycine max
tcgcaacttcataaggaaacagataagttgtaaacaaaataataataataatatagttaatataagataaagtcaataatttatttgatgggtaccaaatattgg

SEQ ID NO: 526 - DNA, 212 bp, Glycine max
cgagtttgaaatggtgaaaatttatgactttatataagtaattaaaaaaattaaaattgtttaattttttatgacttcattatgaaaaaaataaaataaaaacgtaaatctttttacgttttcattttcaagcaaatttttttactacttactcaaatgattaattaaaaaaatatcccaatttgataaatttcaaatggaattacctgctt

SEQ ID NO: 527 - DNA, 191 bp, Glycine max
acgaagaaatttccattgagaaaggaatatatatatattataggtttaaatatattattttatctttgtaatatactccttatatagttttaattcctataaaaaaaattcagtattggttcctataaaatttcattttacgattttaaccattatcagtttgtcactatttatccgtgacatgacaatca

SEQ ID NO: 528 - DNA, 194 bp, Glycine max
aattcaaggtgggagagggggtatataagcaaatagctcaacgaattacacatggaaaatataatataaaaaaagcatttatgtgtgcatatatatatatgaaaagaaaacaaattatattgatataattttgataattattatataattttataatttgatatacaatataatttttattgattcaaccgttg

SEQ ID NO: 529 - DNA, 193 bp, Glycine max
ttccatttcaattaataatgctttagtatttaaaaaattacaataattgacttttcaattataaataaatattaaaacttttattctaatcttatttcttaacaaatacaataattttgaaatgcttatatatatatatataaacaatgctattcattatgaagaaaaaaaaatgtatggcatgaaatgcatg

SEQ ID NO: 530 - DNA, 122 bp, Glycine max
tggatgcatttgttgtcagctactgctcagtccccaacgacggaagtcggcagccctaatttagatggaatacttttattttatttttcatacatattatgtctagcctccgtactaatttg

SEQ ID NO: 531 - DNA, 155 bp, Glycine max
gggagagggaaggaataacaatgggtaatttcactattttattgaaacataaacattggaatagtaagttttcaaaatttttttcctctaaactttctttctttcacttttatttgatttttttttctcagttgttttgttggttgtttgtttga

SEQ ID NO: 532 - DNA, 97 bp, Glycine max
tgctgacataaaccacttcaccatgttagaatttttttttgtactttatatatttttgtaatatatatatatacacacacacgagggatcaaattca

SEQ ID NO: 533 - DNA, 158 bp, Glycine max
caacggttggataaataatgatataataattatcaaaattacactaatataatttaatctcttttatttatatatatatatatatatatatatatatatatatgttaaatatacttccagtaaatataattgtaacactacaagaaacgttgacagga

SEQ ID NO: 534 - DNA, 257 bp, Glycine max
tttccatttctgttccacacatcaaatatgttaagtataaagaaaataaaaacaataatatttacacacttgttagatgtatatatatatttagtaagagagaaaaagagaagtaaaatacgataactactgtgatatgacaaattagagaaaaaatggaaaaaaaagtacattataatattagtattattgtacagaaaataaaacaaaagtggcggactcttttcatgttgcttttctctctcctccttcgtgtg

SEQ ID NO: 535 - DNA, 181 bp, Glycine max
tgcccacctcattatcccctccgatccccataaaaaaaaaactttataataaaaaatagtattaatattattaagacactaattattttaatgcatcatcatcatgtattcattaataatacaattaagtaattaatatctctttcctcaatcattttttcaccatttgagattgagcatg

SEQ ID NO: 536 - DNA, 101 bp, Glycine max
cccggtcttagttccttcgtaccttcatcttccccacacaacaacaacaacaacaaccaagcttttctgttaactcaattgggaggagcaggaggtcaaag

SEQ ID NO: 537 - DNA, 149 bp, Glycine max
caggaattcactggcatcccagcacctcctttcacttcctcctcctcctcctctttccccagaaccaggttagatctctttgcctcttctaattctattgcttcttcttcttcttcttccattattagagagcaaacacaaacacctcc

SEQ ID NO: 538 - DNA, 110 bp, Glycine max
tcctcctcctcctctttccccagaaccaggttagatctctttgcctcttctaattctattgcttcttcttcttcttcttccattattagagagcaaacacaaacacctcc

SEQ ID NO: 539 - DNA, 123 bp, Glycine max
ctaccatccaatgggaaaagaatattatgaacaaagaaaaaaaagggagattcataaatatatatatatatatatatatatatatatatatatatatataattttcacacggtttaaagcaac

SEQ ID NO: 540 - DNA, 116 bp, Glycine max
tacgaaagaatcctggaggggtttcgtttcgacgtacgtacgtacgtttgtttcatagtaataatttgtgtctctatttggtaaactagagagctatacatacaatggcagcatca

SEQ ID NO: 541 - DNA, 104 bp, Glycine max
gctacaggcatttgcattttctaaggctcaaacagtgagccatgccaaactggcaaaaggcttctctttctctctctctaatgcggcagtgccctacaatttcg

SEQ ID NO: 542 - DNA, 115 bp, Glycine max
gtcatgggttgcgtaaagataagctatcaaaaatgataaaaacaattaagtttcaaatattgtagcaagttcttgatagttattattattaagtgcatggattaattgatataaa

SEQ ID NO: 543 - DNA, 171 bp, Glycine max
cctcctatttagtacgagttcaagagtcttggaaataaataaataataaacaattttattctcttaaataatacacttttcttgtttgtttgtttttaaaaaatattgactaaaagaatatatatctttagtacacaccatatgtgggtgttgaggtctattccctccgaa

SEQ ID NO: 544 - DNA, 171 bp, Glycine max; identical to SEQ ID NO: 543

SEQ ID NO: 545 - DNA, 221 bp, Glycine max
ctgtcccggttgatgatatactctaatattagcgaatagtgagcaataacaagtttggaaaaaataaaaaacagataatgaagaacctatttcatcctactcaatatcaatcacaataataaatatatatttttctgttgtttatataaatatatttaaacataaaataataaataaataagttgaaggggggcagaatacaactatacggaccaagaggc

SEQ ID NO: 546 - DNA, 98 bp, Glycine max
aatgcattgtgcatgttttggacggatgcttttaataaaattaattaattacaatatttatatattgtaattattttatgcatacattaaacgcacaa

SEQ ID NO: 547 - DNA, 244 bp, Glycine max
ccagctatcaatgttggagttaaaaataataaaaaaaagattatataaagttactataaagttttgaaagtatataaagtaaaagattatataaaaaacacattgagtctttagttttatgttattttataattattaacaattaattttacaaaacacttttaatttaataatttaacaactatcaagtgtaaataatgaactcttattttattttattttttgagaacgactcttagttaaa

SEQ ID NO: 548 - DNA, 149 bp, Glycine max
ttgctcgtgacctcatctcgtgcagtaattacaagcataacttggtacttgattaagcacaccttgtgcatatgaatgaatgaattttattgctgataaaaaaataaaaacctatacctccttagtacttgatttctgaactcttggtt

SEQ ID NO: 549 - DNA, 297 bp, Glycine max
tcaaccatctcaaactattgccctatcttttatttttatattggtttatttattttttaactgcttatctatttcaataatcattttatctttattttaaattaaattttaatattattttaaaaaagttattagtagtcaaaatattttttatcacaacataaatcatttatattaaatccaaaatatttattttttatgagttttaattgaatataatttatattttaaaaattatttatttattttcaataataatcttatcttatttataagaataatgtatcaatgattagg

SEQ ID NO: 550 - DNA, 88 bp, Glycine max
ggcagtacccaacactgatgtatgtttcatatatatataaagagatcaaatgagataatgcttgagctatttcaatttggctgtaccc

SEQ ID NO: 551 - DNA, 96 bp, Glycine max
ttggctgtacccaacactgatgtatgtttcttatatatatataaagagattgaatgagataatggctatactatttcaaaatgtccatgctgcaat

SEQ ID NO: 552 - DNA, 113 bp, Glycine max
gcagctgccatgtgtaaagtattggtgagtgccttctataaacatgctctcttaaggcttttacttgtgtgtgtgtagtagtgtactgtatattagctcaacttcaatcagcg

SEQ ID NO: 553 - DNA, 99 bp, Glycine max
aggcagcgatgagtgaaaaccaaaatcattccattccattgtgttttcactctcctcttaactcttcatcttttcatttactgcttccttgaacaagct

SEQ ID NO: 554 - DNA, 132 bp, Glycine max
cttgccatgatggtcattcctttatatttttttttcttcttttttcttttttcattttgggtttaccatattctccaagcttgctccgtcgacttgtggggacaaacaaacaaaaacagcatcgatagccaa

SEQ ID NO: 555 - DNA, 126 bp, Glycine max
tgtaaagtcaacaaactaatcaaattgataacatgcatttaaatgacaatgttaaaaaaattatactatcaatgcgtataaattaaattaaaaatcattaccttgagtttcttaataataatggga

SEQ ID NO: 556 - DNA, 100 bp, Glycine max
aggatcctggaaatcacttctaactttatatattttccaatatataaaatacatacatatgtacactatatatatatatcataaatcgtccatgtccaaa

SEQ ID NO: 557 - DNA, 140 bp, Glycine max
aagcaagcctctctcgtatactcttagcttttattccttctctctctctctctctctctcttttcttgctaaaacacctaactaagagaagatatagccatatatatactctccattaacttcttaatggatcattccca

SEQ ID NO: 558 - DNA, 110 bp, Glycine max
tatttgctttgggagcagttttggaggctttttgatttacacgagagcaagcaattgatgcactaacattagctcgttaattaattaattatatgattcgatcgagttgc

SEQ ID NO: 559 - DNA, 113 bp, Glycine max
aacataaatagctttccttcaaaatcagtatatatatatatatatatatattcttgaaagcacaccctatataaaatgcctagggtgttagagtatccattcattgccaactt

SEQ ID NO: 560 - DNA, 230 bp, Glycine max
tttctttggataattggttttacgaaaatgcaactaatataaaatctataattgattattattattattattattttgataataaattttattttaaagtaaaattaaaaaaaaaactaaaaaatgtatcacaacaaattaaaatttatcactttaaaattaaaaaaaatgctataaacgtttttttaggtgattaggacctttagacaatctcctcattggttgaagga

SEQ ID NO: 561 - DNA, 217 bp, Glycine max
tcctcattggttgaaggagaatcacaagccaacacacacacacacaaatatatatatatatatatatatatatatatatatatttgagatgaaagaaaacatattgaaaatgaagtgaacataattatattttttattgtcagaaagagaaaattaagaatactcagaattatcgttagctactatataatatatattggtaggtaaactttctgca

SEQ ID NO: 562 - DNA, 191 bp, Glycine max
agccaacacacacacacacaaatatatatatatatatatatatatatatatatatatttgagatgaaagaaaacatattgaaaatgaagtgaacataattatattttttattgtcagaaagagaaaattaagaatactcagaattatcgttagctactatataatatatattggtaggtaaactttctgca

SEQ ID NO: 563 - DNA, 116 bp, Glycine max
gaaggagcgagtttcacagtagtgtccaaactcagtacaaaacctttttcaaatctttagattatttaaacacattttcaattcaattcaaatactatctcccactcattcactca

SEQ ID NO: 564 - DNA, 165 bp, Glycine max
ggaacaccaagggaagacacacaacacaacacaacaacagaactgagggtaaagtgataggtttcagtatttatttagtcacgtgaatcagtgaatgaccattttttttttccttttttaattttatttactatttattattattgtttctcgcatgttgtcaga

SEQ ID NO: 565 - DNA, 107 bp, Glycine max
gcttcgatgtcgataaggtccgaacgctcaacatggagggcaagaagaagaagcgtggtggcttgttgattgcaaaacccgactacaaaaaagcctacgtcaccctc

SEQ ID NO: 566 - DNA, 120 bp, Glycine max
gaagggtttctttcactggcttttgttcattagtagtggtggtggtggtagtgcttttgttcttttaaaatgaaataattgttttgactctgagatgatgatgctgtgtttgagcaggac

SEQ ID NO: 567 - DNA, 159 bp, Glycine max
ggtcctaatacctaggacaactgtttgttttagtccctatatctaaaacttttatgttttagtttctctctgagtattttttattttattttttatgtttctgtacttttgtctctgttttgtactgaaaaacctaacaaggacaaacaattattggca

SEQ ID NO: 568 - DNA, 94 bp, Glycine max
gagactttccatattgtttgcaagaatttttgttttgttttttccaaatttttggcataaatgagggcgagccctggtgcagcggtaaagttgt

SEQ ID NO: 569 - DNA, 138 bp, Glycine max
tttctgcaaccaaaccacaagtaaagatgaaaaacaaaacaaaacaactgaatctcaattaagaacgcattaaacaatgtgactcttcaattcattgttgtacagtgagaactttaaaccttacgggatctgaacagc

SEQ ID NO: 570 - DNA, 116 bp, Glycine max
agattccgattcggttaaacgacatgtcgtaaaaagtactaaaaatgaactccaaatgcaaaatgcaggttagaattaattaattagagacataactgagagcgagaatgaggctt

SEQ ID NO: 571 - DNA, 109 bp, Glycine max
tcacgggtttcgtaactgttccatccccagcccgtggatcgattctctgcttgattcttcttcttcttaattatataaagaaaatgacactctacttacatttatacgg

SEQ ID NO: 572 - DNA, 240 bp, Glycine max
cgtgccatgtttcaagatcttgattaatttaagaatttaatttatatttatatataatgtcagtctttatatatatatatatatatatatatatatatatatatatagacatcagaaattcattatattgttacattttcctattgaatatctgttacacaaaatgaaaaatattaacatgatattggaaaccaaatgatataattaaaatacaacatgttggtttgcttgcttatgcgt

SEQ ID NO: 573 - DNA, 89 bp, Glycine max
cagttgttcaaggcttcgatgctcttctcttctggaccccacccacccacctactcggaaaaaaacagttagagaaacagggattccgt

SEQ ID NO: 574 - DNA, 218 bp, Glycine max
ctttggaatttcgttatcttttagaattttcgcaaaagaatcaaattaaaaaaatcttataaatcttttagaatatagtttagaagtctgtaaaatgatcttaaaaaataagttattttgatcattttgaaaattaaaaaataatcaagttaaattaaattaaaatcataatgaaaataattaattttagttataatgagtttaattgggtctaattt

SEQ ID NO: 575 - DNA, 137 bp, Glycine max
tgaagggtgttgtgaaggttgattgattgatttattggttcttaatttgttatattttactattttgttgtttgatttgtatgtacttgacttattattatagtgttttatttttctccttatgcctctctttatcg

SEQ ID NO: 576 - DNA, 380 bp, Glycine max
tttatccattattcaacaacgaataaaattttcacaattatcttatattttaaattatataattaatatcatgactatcacatttaatacataatttttaatttatatttcatacttcataattttttaattaaaattatactaaagtacataaatatacataaacaaattataaaaatatttaaatcttaataattagtatttttaattaatcataaaaattcatattttttattcactttagttaaataattttcatttattttaacattagaaatttaatttaattttttaatttattgaaatataaaaaatttacttgagaggtaaatagctctcattttacatataaataataacaacagtcggattgtaaagtg

SEQ ID NO: 577 - DNA, 310 bp, Glycine max
atttacctaaagtgaatacagaatataaatttttatgattaattaaaaatactactaagattttaatattttataattttattatatatatttatgtattttagtataatttgatcattaaattttaattaaattatgaaattttaattttatacctaaatgatatgaaaaataaataaataaataatataaaagaaaaattaaaaatgatacgttaaatgtaataatcataatattaatgataaaattcaaaatataagataataatttaaattctattagtgattgaagatgaagttatttaatcgca

SEQ ID NO: 578 - DNA, 84 bp, Glycine max
cttgttgccgttgaacttccttaacctaaaaatgtccaattctatctccgacccgacccgaataattcactctcaggatccgaa

SEQ ID NO: 579 - DNA, 97 bp, Glycine max
tccatggattgaggtgacatatacaacctaagttatttgagccaacgcctatattaagcctttatttatttatttttttttcctttcttggtttaaa

SEQ ID NO: 580 - DNA, 147 bp, Glycine max
tatttgagccaacgcctatattaagcctttatttatttatttttttttcctttcttggtttaaaattttgttacgaattacatatatatatatatatatatatatatatatatatatatttattgttgagcttgttatatttatgtt

SEQ ID NO: 581 - DNA, 201 bp, Glycine max
aagataacgattaacatgtcataaaaaagaaaagaaaaaaagaagagacaaacataaaacaagaaaaatggagaattaaattgtgttttgttattttaaaaattaatttgaccgataaaatattttgttctacataaaacctttaatagacaatgtaaaaaaacttgtatgttattttaaacaaccatcttcaggctccat

SEQ ID NO: 582 - DNA, 115 bp, Glycine max
accatcttcaggctccatacgcactttttttaaataaaaaaaaagagagagagaaagaaagtgcaacttaagatacactactgtaagaattaaaagaagatgattctcaaagaaa

SEQ ID NO: 583 - DNA, 169 bp, Glycine max
agaaatgcttaatgatatgatcctaaaataaaataatctttagatttattgttagatatagtcatctatagagagagagagtcttcaaaattgttgtttattcttataatctttaaaatgatgcttatgaaaactatatatatgtttcatgcagacaacgtgaattgtc

SEQ ID NO: 584 - DNA, 294 bp, Glycine max
atcatttcatgcgaccaaaaccagacacatgatgctctttctagacgttgtattttttaaattttttttatttttacacccattgtattctatttgttctttgcatatatatatatatatgtatgaatgtatcgtccatatattcttttattgttcagctttatattatatatcaagaaaattttgttgtttttactccttgtgattagttacagtttcttcaattaaatggttgaaaaacaatagatgaacatgtaaagtcatggaaagcaatagaacagagatgacgaagca

SEQ ID NO: 585 - DNA, 87 bp, Glycine max
tgtaaagtcatggaaagcaatagaacagagatgacgaagcaaataagttatttaaaaagaaaagaaaactgaattgcactgttaccc

SEQ ID NO: 586 - DNA, 218 bp, Glycine max
tgtaacgaggatttggacaatctctttgtttattttgttactcttttaatttgtttttgcgtttacccttttaaaagaaaactttatttatttattcatttaaaaattgaagataacattatatatgttttttctttgaatatatcctttttttaatctcattcttaaacatgttatatatttattataaataagagagaaacaacaatagagatcaa

SEQ ID NO: 587 - DNA, 184 bp, Glycine max
ccctctagttcaaagtccaattattattattaactcatcaaaatacttaatctctaattcctcatatggaaagaatctaagttccttaaccaaactatcaattctttaattagtttaatcaagtgacttactttaagaataagagttaaaaatgactaacaagttttgctctatccctagctgg

SEQ ID NO: 588 - DNA, 168 bp, Glycine max
caatgtcaacatgtgatacctctaaaaaaaaatatgctagatttctaaaataaatgttatctatctatcttaaaataaatttagcttaaatgtaattttggtatgtctattttactcaattcacaattttgattctttcattttaaaatagatacagttggtcccttt

SEQ ID NO: 589 - DNA, 78 bp, Glycine max
ggtgctttgctttcatcacttatgagttgtttccctcccttcccttcccatcattagagttacttcaacaaataaggg

SEQ ID NO: 590 - DNA, 109 bp, Glycine max
agcacatggcaaatcttcatctttgtagttgcaatcagtaaagaaaaactgtatatataaagataaaaggaaaggaaagaaaaaatgaggcaaattgcctgaacaacga

SEQ ID NO: 591 - DNA, 310 bp, Glycine max
tgtgtaaaggttggacctgttatataaacttgatttaatacgttatagttgtaaaccatttcaaataatgcattttaaatttagatgtacaaaaaataagacatttcaaaattaaagagatgaaaaaaaattaaagggattaaaacttaacttcaataattttaaaatgacaaaaacatactttttccaataagtcataaattagtaaattaaatttatctattaaatacttaaattaaattaatcaaaaaggttacgagttagtcaagtaaggatgaaaaaaacgcaccaaatgaactctttccctgcc

SEQ ID NO: 592 - DNA, 87 bp, Glycine max
aacataagtcccataagtctcgagaaaaattgaatattttattattattacttaactgaaaaatattagtgggagagaaataatgca

SEQ ID NO: 593 - DNA, 99 bp, Glycine max
ctacgcgctagccaactgcgccaccaccccatttaatgatttataagcactgttaacttatatatatatatatttattttaaagccaaacattacagca

SEQ ID NO: 594 - DNA, 192 bp, Glycine max
tccctagcactaccaaacaatgatggtcatttttagtcctcaaattacaaatatatatatatatatatatatatatatatatatatatatacactaaaatgacttgtggtaattttaggaaataaatgacatttttataatttcaagtaccaaattgactaacactttaatttaagggattaatttggttgg

SEQ ID NO: 595 - DNA, 108 bp, Glycine max
ttcacaactgaattcaaccactcaaaaagaatcccaaatcaatcaatcaatgtgtacataaagctgaagataataactagacctgataggaaagtcaggaatgcacca

SEQ ID NO: 596 - DNA, 204 bp, Glycine max
tggtagctacttcgcaatgaaaagcttcagagaaggcttttatcaattcgaaaataaagtactaatttgtaacaaaggcggggtttagggttttagcagaaacaacagaaaaacagagagagagagagaagaaagcttacgacaaaacggcgtcctccaggggacttgttgagagacttaacagctcgagcttgtgaagccgtc

SEQ ID NO: 597 - DNA, 115 bp, Glycine max
gggacttgttgagagacttaacagctcgagcttgtgaagccgtcgccatgttctgttctgttgaagtgttagtgttacagttgcagcagagatgccgccagagaaagcgaagaga

SEQ ID NO: 598 - DNA, 103 bp, Glycine max
aaagggtccttcacataacataatacccaacttagtcattttcaaacaacacacacacaacaacaacaacaaaattatggctttagttaaagcctaccggtgg

SEQ ID NO: 599 - DNA, 103 bp, Glycine max; identical to SEQ ID NO: 598

SEQ ID NO: 600 - DNA, 150 bp, Glycine max
gcacagaagatggtggagtagaaatgtaatgagaatagtaataagcaagattggggtggtggagttctgaattgaattgaatgaagccatgatcatgaataatgcgtatcatgtcatttcttggtgtcattaccaatcttcacccacaca

SEQ ID NO: 601 - DNA, 129 bp, Glycine max
caacacaacccagagaggggaaaaataaaatggttttaagaacttattttcagcgttttgagtgatgaatgcttttaagtcttagagggtgtgtgtgtgtgttggcagtatagtgccatgtggaaacag

SEQ ID NO: 602 - DNA, 149 bp, Glycine max
aatgtgggcatttatttgtatctatatgcattcattatatgtgtgtgtgtgtgtgtgtgtgtgtgtattgtcaatgaatttactgaatacctataagctatgaatccttaaaatagtataaaagaaaaataaagggcaccatattagga

SEQ ID NO: 603 - DNA, 105 bp, Glycine max
gtcttcgaggaatgcagatgagagctgcaaaagcgaaagggaaatgaaatgaaaatgcaaatgcaaatgcaaattcaaatgaggaagtggaactgacagtgggaa

SEQ ID NO: 604 - DNA, 137 bp, Glycine max
gcacggcactagtcgttttttcactttaacactcctccaaaaatcaaatctaaaccaaaaaccgttggttaattatcacttaaactcaaataatcaaacaaacaaacaagctagatttgaaattgaaagagcaacaa

SEQ ID NO: 605 - DNA, 96 bp, Glycine max
tgaaattgaaagagcaacaacaaatttagaactaagaagaagaagaagaagattgcattggagaacaatggctagtggaagaagctacggagacgc

SEQ ID NO: 606 - DNA, 212 bp, Glycine max
ttcctttatcgaggatggtatatttagataaaaattagtatgcttgtttttttttttaccgggataaaactagtatgccaatccccgtaaatgtacaatatagatatcttttttgtacataattatttaattatataagttaaaattattatattatatttgtttaatgaattaaattaatataaaaatatagaaaccttcaatgtgattca

SEQ ID NO: 607 - DNA, 272 bp, Glycine max
agaaaccttcaatgtgattcaaaattaaaaataacagtataatttcaataataataataacaatgaaataatgttttaaagactataaatctttagaacttaaaaaaataagatttaaattatatttaaaaataataataattaataattggtacatttaatttaaacttaaaaataatagtaatcattataattttaaaaatgactaagtttaaattgaaagataatatattataacaataatttaaattttaagaaattaattccgcttt

SEQ ID NO: 608 - DNA, 272 bp, Glycine max; identical to SEQ ID NO: 607

SEQ ID NO: 609 - DNA, 106 bp, Glycine max
cttgggcctttcttctctaaactcttttaacttcccttcttcttcttcttttttttttttttataaagaaactcttataattcccacttgtacttgatagagaacc

SEQ ID NO: 610 - DNA, 199 bp, Glycine max
tgtcttgcatatattcatattcctatctctttaataataataaaaataataactaacctatgtaattattataaaaaagaaaatatcaattttttttatttcaataaacacattaaatttaataaattatattaaaatgattaatattaaatattttaataaaatttatattattttactggtattcatcatgtacaaa

SEQ ID NO: 611 - DNA, 84 bp, Glycine max
ccacccatcatcatcttcacaaccaccaccaccaccaccacatcaagcacgctcaccacgaatccttcttgccagctggatatc

SEQ ID NO: 612 - DNA, 155 bp, Glycine max
ttggtgcagacttacgtgcagcctaaaataaaaggaaaaacaataagctgctagcagagaattcaaaaacccaaaaaaaaaaaaaaaacgcaagcaattaattaattaatattttgtcataatgactaaaaaacaaaccttggttgcaagctgct

SEQ ID NO: 613 - DNA, 80 bp, Glycine max
tcgtgaataaatatcataagaaacaaaattttattaaaataaataaataaataaatatatttgatggttaaatttcgatc

SEQ ID NO: 614 - DNA, 155 bp, Glycine max
tcgagcagcttatcaagggcctttggcttgacctgtttaagtaataataataactattattattattaaataatttttttaaaaattctttagattcttataaaataataaataaaaaataaaagtagttgtattgtaaccagcatctcaccctt

SEQ ID NO: 615 - DNA, 155 bp, Glycine max; identical to SEQ ID NO: 614

SEQ ID NO: 616 - DNA, 284 bp, Glycine max
accaacctagaatggttagccttctacatagatcatcttagaatcaatatagaatgtttttatttatttattatttttttagtttgagctatttttattttatttttcacaaaaaaggttcttcaaatatctacaataaatatgtgagaatatgaaattaattaaactttaagcaatgaattttaaattttcaaatcttttgtagtttgtaacatagtttgttgatattacttatttaaagtttttttgaagcttgactgagccgattccatgcattcgctagt

SEQ ID NO: 617 - DNA, 284 bp, Glycine max; identical to SEQ ID NO: 616

SEQ ID NO: 618 - DNA, 100 bp, Glycine max
agcccttgggtctagttgggttattagtgattcattcattcagacataaataagaatataccgggacggaaggagaagcgaaagaaagaaatcgagagcg

SEQ ID NO: 619 - DNA, 92 bp, Glycine max
atcgcaaccgatttatgatctaactctccgattccatatagcgagagagagagagagagatgtgggtgttttacctgatttcgctgcctcta

SEQ ID NO: 620 - DNA, 113 bp, Glycine max
aacatatttgctcccttaccttagtattatatatttatttattttaattggtgaacggtgtgaccatgattgcagcgaatggggaacattgacaatgctgttcctttctttgg

SEQ ID NO: 621 - DNA, 186 bp, Glycine max
tcatgatgatcgttaaagaaataaaaatgtttaaaaagcataataaacttatattttataaaaaaaacaattttaaaattataataactgtactaagaatatttattaacattttttattcttaaatttatttatttattatgtatttaataggaaaatgtttgataactttgtacaatcgggtga

SEQ ID NO: 622 - DNA, 225 bp, Glycine max
cgtaccaggtggtccttaaattattatgactatttaagtcagtttgatatcttcgatttttaccaatatatatatatatatatatatatatatatatatatatatatatatatatatatatatatatatatatatatatattatcactaatgtattttaaaaatgtactagtaatgggttttttcgggttttgataacctactaggattggtctagtagtttgga

SEQ ID NO: 623 - DNA, 277 bp, Glycine max
cggaaatccttacactctgataaaatgcactttattttgatattttaatctcattcttttttactcgcatgacaaatataaatataaatataaaattatggaattttattttattttctattcgtgtaaaaaaattatactgtcaactaattaaatatcattagtgatatatttttaagataattattataaaaattaacaaatttattatatatatatataataatttataattgaacaataatataatttcttttcttccattatcaatacatat

SEQ ID NO: 624 - DNA, 277 bp, Glycine max; identical to SEQ ID NO: 623

SEQ ID NO: 625 - DNA, 99 bp, Glycine max
ctttcacgtcgctctcatgtaatgtctcgacgtgactcttggatgctctctctctcatgcgtctacttcccaccaaccaattccatcaacagtgaaccc

SEQ ID NO: 626 - DNA, 208 bp, Glycine max
ttgaacccactgattcaactttttcattctccttatatgtttattatttatttattttatttaagtattttgatttgaaagtcaaattttatcttttcacaatatgatatatattaaaactttataataatgtgaacatttatatctttctcttcatgtatgcaataataataatttattaaataaatggtctccactaacacgggaa

SEQ ID NO: 627 - DNA, 208 bp, Glycine max; identical to SEQ ID NO: 626

SEQ ID NO: 628 - DNA, 191 bp, Glycine max
tttggcttctctcatctttctgtttaattaattaattcccttttatatttgtttttctttcttgtttattttaatttaatttatgtcaatttattttagtgttttcttcgcaaccttttaaaccaatttatttattgtttaaaaattatatatatttacctacctaagtgaaaacgaagtctcgtgaattc

SEQ ID NO: 629 - DNA, 191 bp, Glycine max; identical to SEQ ID NO: 628

SEQ ID NO: 630 - DNA, 276 bp, Glycine max
tttccagccacaagtatcatactaaaatttagggagatattgtaaattatatatatatatatatatttctcatttttaaatgtaaaaattatgaatgtaaatcatattattatatataaatagtcaagttcaaaagttaattaatatttatatgacaccttaaaaatgtcacctatatttttttcttatttaacttaaataaaacctaatgatatgtatttaacttatcattatcattttcaaataatcaagtgtttttcttctcacacacatgca

SEQ ID NO: 631 - DNA, 163 bp, Glycine max
ccactcccgatatacgacacataccaaaccccattttttaatatataataaaaacgcggaaatgggcgtcgccgtcatgttttcttttttgggctccaatcaaaataaataaataaactttgacaaaagaatgttaaaatggggaaagatcaagaaagcttct

SEQ ID NO: 632 - DNA, 197 bp, Glycine max
acgtttcttgaaatcacattcttagtaatatgaaaactaaaaatactattcttagttatatttaaatagcagtaaaaaaagttgtatttaaataagtattttattttattttaatatccattgaagtatttttttaaatttaaagtaatttaaataaatattaagtaaaaattgaagttacaaatgtgataaagaaa

SEQ ID NO: 633 - DNA, 148 bp, Glycine max
gaccgaatttgaaaccaaaatttttaaaattaatgtgaatcttaaacctttatattttacttttacaccaattttattcctttaaaccacacacagactaaaagagagagagagtgtgcaaaagcaattgaaattgcagaagcttgga

SEQ ID NO: 634 - DNA, 121 bp, Glycine max
gaagcttggaacgagtccatgttttgttttgttttctatagatccccagttccatattacatcattatcgtaatgataagtaatgataactacaaaatttaacgtaatctgacggacgctg

SEQ ID NO: 635 - DNA, 178 bp, Glycine max
ttgagttcaatgaggcaaaaggatattgtttaaccgatttaattatttttttttttgttttctctttcctaaaagtagtacaccgttgttgttgttttttttatttattaaaaaagtactacaccgttattccatacttgaatggaaatttgtttttacagcatggtttgctttacga

SEQ ID NO: 636 - DNA, 122 bp, Glycine max
tggatcttggatctgtgtctgaatttaaaaaaacaaagcaaaacaaaaatcaatattatagaagtgtgatttaattaattaattaagcacctgttgatggacaaattgtcatgagggcactg

SEQ ID NO: 637 - DNA, 102 bp, Glycine max
tccttcttcacccatcaaataattcataaaacacaaaacaataccaaacaaacaaacaaatttatctcaacacaaacaaaataaaaagcacaacaagaagct

SEQ ID NO: 638 - DNA, 301 bp, Glycine max
accgtttagtgacggtgatagtatttcttcatgttagaccctaacatgtacttaattaattaattaattaattgttaattagttgcatataatatatgtttaaatatgttttttttctgtgtaagtttaaactttttcaattttgatgtcaataaaatttttggttcttttttatttcttataaatttacatttttaattttaatttctataaatttttgtttttttttattttgattattataaacataaatttatgataattataaataaaaaattaaaatttcaaagggattaaattt

SEQ ID NO: 639 - DNA, 109 bp, Glycine max
gggattagacacaacatcaattgggtttttaaataaataaataataatattttcatgataaacaagaatttatattttttttaaagagcaaattacaggataaacaatg

SEQ ID NO: 640 - DNA, 104 bp, Glycine max
tcgacctgtagaagcaatggttaattaactagtcattgagttaaaataaaataaaaaaagtatttttttgaagcgaggctgcttcccgtgactatttctcggga

SEQ ID NO: 641 - DNA, 159 bp, Glycine max
gcataagcctgcagtggctgctgccccctaagtccaaaactttttaaatatttcctaataaataaataaatcaccccctctaatatttttcattcatgagtaaatctatatttttgccccattcccactcaaaacattatctgttggttctgtccatcg

SEQ ID NO: 642 - DNA, 108 bp, Glycine max
ccgaataacatttgcttcaaacttatatatatatatatatatatatatatatatatatatatataggaaacctataatttcattggtttagttgcatttccctatgct

SEQ ID NO: 643 - DNA, 199 bp, Glycine max
tttgatacaacatatcaagaaagattatgtatgtcaatttaattatttttttaatcattttctcctcatgtttaaaagtattatttcttcaatttgtttatatctaataaaataaaatactcactattaataaggaaaacatctaatattaggtagtattatttttaacagttatattgttgatgtaactgtcagaatt

SEQ ID NO: 644 - DNA, 103 bp, Glycine max
aatcatccttcacgttgcctcttcttcttcttgcacattttcgttacttcctttcccaaagtgcttccttttttaacatgttgtctttccaacaacgatcacc

SEQ ID NO: 645 - DNA, 117 bp, Glycine max
tctttatcgcatacccaaatttgcatttttttcgtttgttcactcatttttcttttcttttcttcactcttttttgtatgtgtcttctttatgtcatttttgcttggttgtaatggc

SEQ ID NO: 646 - DNA, 119 bp, Glycine max
cgcagaggcaaagatagattactaaacccacaaccacactcacacacacacactcctctctcagaaaaatacacccttttttctttcacttcacttagggtttcatcgctattgcttcc

SEQ ID NO: 647 - DNA, 110 bp, Glycine max
gagaagcacgatttcacgccgacgctggattccaacgtcgtcgtcgtcaaggacgatgtggattgtcgccttcgaccggtgttcgcgaggcacgtgaaagggttgacgga

SEQ ID NO: 648 - DNA, 108 bp, Glycine max
aggctgtctcaggcttttaaaatcaatataatattttttaaaataaataataaaatggatatatagaaagaaaagaaaaggaagtttgaaataagtcaagtaatgttg

SEQ ID NO: 649 - DNA, 167 bp, Glycine max
caatcaggtaagccaacgataattatcagcatcttgatcttcaaaaagaaaagaaaaaaggtaatctggtattttaatattcagaccaaactgttaaacataaaattaaaagtattattaggtggaaaaaaagccaacacagactatataggcttgacactctccct

SEQ ID NO: 650 - DNA, 156 bp, Glycine max
tgacactctccctctaccaaattgttactttctgtaaacttgaaataaaggaagaaagagtacatttaaaattacacttactcacagagcataggataaagctaaagacatgccatgccatgcatgttattagctctgctagaccatacggtaggc

SEQ ID NO: 651 - DNA, 103 bp, Glycine max
acgcttaacagcataccccactttccttccattgcagtacatactccacaaaggcgtggaaaaaaggttaaggttgttgttgttgccactctccagcacaatt

SEQ ID NO: 652 - DNA, 189 bp, Glycine max
aaacacaaacatacaatgactaaaaataaaataaaaaagttattgagaccaaaattaaaaaaatacatacttacatagattaaaaataaacaaaatattttactgaaaacaaaattaaaaaaaaaattactctaatcaaatcaaaactaatatggactaataacattttaaccaccacttgtgatacaa

SEQ ID NO: 653 - DNA, 100 bp, Glycine max
tcgttagcatcctggtgtttattttgtttaagctccgcgcgtgttgttgttgttgttattcttcttcttcttcccaacgccataacacaaagctcgtggc

SEQ ID NO: 654 - DNA, 100 bp, Glycine max; identical to SEQ ID NO: 653

SEQ ID NO: 655 - DNA, 104 bp, Glycine max
tcacgtctcaggataccgtaatcgacattgatgatgatgatgtcgtcccaatggaacaactagaacatgatattggtacagagattacagagtcagaggtggca

SEQ ID NO: 656 - DNA, 95 bp, Glycine max
agattcgtccgctagctttgattgtcggttttgtctctttctttctttcggcgaaataaactgctagctagcttctttgattccaagtgtctgca

SEQ ID NO: 657 - DNA, 105 bp, Glycine max
aatgaaagcatgaccatgtatttattcatctaatgaagtgtgtaatgtaatgtataatatgtatataaagagaattgtaatcaaatagtataatagcacgagaaa

SEQ ID NO: 658 - DNA, 196 bp, Glycine max
aatgaaagcatgaccatgtatttattcatctaatgaagtgtgtaatgtaatgtataatatgtatataaagagaattgtaatcaaatagtataatagcacgagaaaaggagagagagaaaaatgtgttaattacatcttttatatataataataataataataataatagataaaaggaatatccaattcaataatt

SEQ ID NO: 659 - DNA, 103 bp, Glycine max
agaatgaaacgtgatcaaacccaatccaatccaagtgtggaaaacacttctttcatattccttggtcttgtttaggctagtgatcgataagccctataaagcg

SEQ ID NO: 660 - DNA, 147 bp, Glycine max
tcatgatgtccgtggattaattaaaaaattagctagtatacaatatatatatatatatatatatatatatcaattatataacttaagcctttttatatttatcaatttgaatttcaaaattttaatttttgcacaccatattggatt

SEQ ID NO: 661 - DNA, 121 bp, Glycine max
cgatgacgaaactgaaagagctgatagggataatgaaggacaaagcctcgcagggcaaagccgcgatcctctccaagcgcgccactctctctctcctccgcgccaccagccacgactccta

SEQ ID NO: 662 - DNA, 143 bp, Glycine max
actgcgcagcagtgatataactctgatggtagggaataagaatagttttattttattttatcttatgtatatcattcttacctacttttggatggaatgttttatgaggagtattttatttttgttgatcatattatccatcc

SEQ ID NO: 663 - DNA, 81 bp, Glycine max
aaagaaagaggcaagacgctcttatatatatatagcggtgaaattagcggtaaaaaacgttaggccattacgatttaaatt

SEQ ID NO: 664 - DNA, 104 bp, Glycine max
ttgtgaggcccaaataagcacttaatatagaaattcatacaataacactttcctcaacatactcacactttatatatatatacacacacacaatcacttgaacc

SEQ ID NO: 665 - DNA, 95 bp, Glycine max
aatgcgcgtgtagaagaggtgttttactagtatcattaatgagttttaggttggctaatggctatatatatataaatacacatttggaagaagcg

SEQ ID NO: 666 - DNA, 142 bp, Glycine max
tcatctgattgcctgcattatattttcaacgcttaaatatgttttatttatttattgtaaatatgattaaattttggttgttgattttgatactttattttaaaatagtctgtcactaccaagtgtgtgtttgtgtttggaa

SEQ ID NO: 667 - DNA, 98 bp, Glycine max
actatggccacaaccacaagcaattcccaggcatgcacatgaacatgaacaacaacaacaacaacaaaaggcttggtgcttttgctgctgtggactct

SEQ ID NO: 668 - DNA, 101 bp, Glycine max
taaggcctctcaccatttttcaaagggtggtggtggtggtggcaagttcaattctggtgagcaccatgagtatttctcggaggaaaccgagtacgaggagg

SEQ ID NO: 669 - DNA, 84 bp, Glycine max
ttatttgccgctcaatgtcctttaatattaccattaccacacacacacgaaataaaagagccagcaacacgacactcgacaggt

SEQ ID NO: 670 - DNA, 101 bp, Glycine max
gctgtggcacaatgacttgtactgagttattgacaccctcctttcccatgatgatgatgaactttcatcatgttcaatgtttgaaccattagcagcagcac

SEQ ID NO: 671 - DNA, 125 bp, Glycine max
catgcttcctcaccagttttatgtacctgcacttgaaataagagaggcatatgaaaatttgattataaataaataaaatcttttaaaaaaatatccctctcatatccaatactcactcttccgca

SEQ ID NO: 672 - DNA, 182 bp, Glycine max
ttcccttctcttcttccacctttacttatgaaaattaattagagagagagagaaagggctgtgattagtgattgtatttgaattttcaaatcaaaatcgattaggatgattagtgattagagataagtaattgtccttttgattgaagttgttggtgtaaaagataaggcgaggtggtgata

SEQ ID NO: 673 - DNA, 103 bp, Glycine max
taaggcgaggtggtgatagtggtaccactagataaaataaaataaaaaagacaaggttgtgatgttttgttattccgtttattaggcaaaggatttaggtcga

SEQ ID NO: 674 - DNA, 151 bp, Glycine max
catgccttatggatgtttgttacgaagtattttaatgatattaattaattaattaataatttcctattggatttttttctaaaaaattcttattataagcgatttcttaatagttaagaacatcttaattatatcggttctaaatttggct

SEQ ID NO: 675 - DNA, 128 bp, Glycine max
ttgaagacaaattggacaaaaatacaattttaccttaattttatcattttcttagaagtaaaaaataaaataaaatcaatcaagtcaaggggacctaaatattgaatgatctgaattagtacgtgagc

SEQ ID NO: 676 - DNA, 212 bp, Glycine max
caatacaaccattagtaaatcatgtaatattatcttcacgatcatatatatatatatatatatatatatatatatatatatatatatatatcaattttttagatcaattaaacatctgtaaacatttattcttatagtctacatttagttgtttttttaaaaacatatcatgcattaaattaagataaatattaatggatgctcttaggaca

SEQ ID NO: 677 - DNA, 107 bp, Glycine max
tgcaatgtaatggttcagggaccaatatatatatatatatatatatatatatatatatatatatacacggatcctttttctaaatttctctcttcctaactagcaaa

SEQ ID NO: 678 - DNA, 113 bp, Glycine max
agaagagactttcccatcgccacattatatatatattatatggcggccgccaattcttttatacttttaactttcaacaatttaatttgattatggtattgtttaatcatccc

SEQ ID NO: 679 - DNA, 96 bp, Glycine max
tcatcggtgaagaaggagcacatgtgccggtcgcggtccttggacgagtgtcgatcgtgctcgtcgtcgtcggcgaggtggttgtcgggaatgaga

SEQ ID NO: 680 - DNA, 116 bp, Glycine max
aatgtgacttaatgacgtgttttaactccacaattatgagtatgtaataccaaagaaaccaaaaatataaacaagttatatatatatataagcaacatagtggtgatcatgtccct

SEQ ID NO: 681 - DNA, 203 bp, Glycine max
agtcatgattgccgatattttaaaatattaaattgttaaaattattaatttaaggtttaatagttcaactgataatagttaaataatattttataattttaaataaaaataatataattgcattatttttaaaagtttttttgtgtgcaatattattattatggtttaaaaaattaattattatagcaagcaagcacattaaa

SEQ ID NO: 682 - DNA, 90 bp, Glycine max
ggttagaccggttggtttgtcccattttttacaaccatgatgatgatgataaatacgataatacttatgacaatgatatgcaagtctcca

SEQ ID NO: 683 - DNA, 223 bp, Glycine max
tcatcacaaccatccttctatcattcacaaataatattataatttatcgttattattattaccaccattactgttatcttttcattatcactaatcatcataagtatcatcattaatactattgtgatgattattattgttattataactatcataatcactatttttgttgctaatcttttccaattataaatttattattgttgtggttgtagtcttatca

SEQ ID NO: 684 - DNA, 164 bp, Glycine max
tttccagtggttggtttgattttcctcagtaaaagattcacaatttctgctgtgttttactctcaatcataaatagtcaatatcaaatatttaatatgttaattttgcagaaaattatactaagcattatgattattattatttgcatttgaacttcttgcttt

SEQ ID NO: 685 - DNA, 217 bp, Glycine max
gctcatgtaatccgtatcttgattctcactaaaggggttctctttttttctggtatcgtaaattttatatatatatatatatatatatatatatatatatatatatatatgttaaaaacatatgttaattaaaaaaaaaccttcttaagaatagcttgaagttgtaaaacttactatattgattaactaatcaaattttggtgcacagttgtaattg

SEQ ID NO: 686 - DNA, 123 bp, Glycine max
tagtccagcattcgttgccaaaccaaattttaatctaccacacacatatataattgccaaaccatacacagagagagagagagagagagagagattagagatgtaatggtcaaaggaagggag

SEQ ID NO: 687 - DNA, 168 bp, Glycine max
tggttcctcatgaaacaaagattaactcattttctcaatttcctaattatcttgtcaactcacactactcaaaactcaaatagtagatgcagatctgaacaaacaaacaaactaagcaacttgcttttaaaactattgactactaacaaactcctaactaccacatgg

SEQ ID NO: 688 - DNA, 118 bp, Glycine max
accttaacaaagacccatttttatttacataaataaataaaaaagatttgtgtcaactttgtgaaatgattgagaagtatgaaaatcacaatcattagttacctgtcaacgtgacatg

SEQ ID NO: 689 - DNA, 176 bp, Glycine max
tgcctatatgcacttgctatataatatattatattatattcgtgaattaaattacgtgaatttcaaatgctagtagttaaagaatgtatggaatattcaaatgacatataatggcgtaaatttattaatttaatttgtgaatgttttccagtgttattcgtgtcttgcatttggat

SEQ ID NO: 690 - DNA, 205 bp, Glycine max
atatgcccagcaaccacatgcagggttgtatatatatatatatatataatatttcatggacactcattatattataagatatttagagagagtgaaaaaatacaactattataagatttataatgaaaaaacagatagagaaaaataagaattatgtatgattgggttttatatattacattttttgtgtacgtcctggatcagg

SEQ ID NO: 691 - DNA, 176 bp, Glycine max
ggcgtttctgagaagaagaaaaaaacttaatatattaaatactactgcatacttataaattcaaaattccaacaaaattaaataatagcttttttgtgtgaaattaaataatatatatatatatatatatatatatatatatatatatatatatatatatttgctggtgttggtgg

SEQ ID NO: 692 - DNA, 96 bp, Glycine max
agacagcccatcttaaatcaataaaaataaaataaaatgatctatcaaaataaaaataaaaatactcaaaaaggtaaaattaacccaattgcgaga

SEQ ID NO: 693 - DNA, 127 bp, Glycine max
ggtccacatttatgaaccaaactactagcttcatctttctatatatatatatatatatagaaacaggattatccactcatagaacagaccctcgtaatttttatagcatggaatgctaatgtggtgc

SEQ ID NO: 694 - DNA, 110 bp, Glycine max
cctagggtactcagccaattatttactctatatttatttatttatttatttattactaaaaagctttttaaatttatttacgaaaaattgggatgttacaattccacctc

SEQ ID NO: 695 - DNA, 107 bp, Glycine max
cctagggtactcagccaattatttgctctatatttatttatttatttatttattactaaaaagctttttaaatttatttacgaaaaattgggatgttacataagcaa

SEQ ID NO: 696 - DNA, 141 bp, Glycine max
caggacaggtgtggagaatatcatggtccacaacaaaccaaaccaaaacctaacccatcctaatcttacgtacaacctctataaataaagacaacagtagctccaatttcatttaccacacaacacaacactacccaaggc

SEQ ID NO: 697 - DNA, 150 bp, Glycine max
tccacaacaaaccaaaccaaaacctaacccatcctaatcttacgtacaacctctataaataaagacaacagtagctccaatttcatttaccacacaacacaacactacccaaggctactagagtagaggctccagcagcttgttccaatt

SEQ ID NO: 698 - DNA, 144 bp, Glycine max
ccaattccaacacaaggacaactctccaatgctatgtttggtttaaatgatatatatatatatatatatatatatatatatatatatatatatatatatatatatataattaaaattattttttcctatgtttcttccctctcc

SEQ ID NO: 699 - DNA, 167 bp, Glycine max
ttccttgaatatctggcaattagtgacaaaaggaatgataaaaaaaacataattaagaaagaaggtattgttaaaaattatcaaccaatttttttatgtacatataaaaaatattgatatatatataaaagaaatatctttctctttcttgatcttcagaaagtggg

SEQ ID NO: 700 - DNA, 245 bp, Glycine max
cccgctctcttgttctatttatacctattttattttatttcttgttgtttatataaaatgataggatgtagttttctataaccaggaaaaaaaatgaaatttacatcgatcttcaaaataaaatgaaaaaatgtataaagataaaagatagaatataagaaaaagaaaaaaaaatagtcactaaaaagtgaagtgtacacttgttatatcactcatcgctgttttaagaggttgtcacttgggag

SEQ ID NO: 701 - DNA, 138 bp, Glycine max
cgttgctcaaccaccttaaatgctgtctttcagaatcacaacactactacccacttcttcatttgtctcatcatcatcacctacgctgccgctgccgccgccgccacttgatatggcttgttgttgttgcttgttccc

SEQ ID NO: 702 - DNA, 99 bp, Glycine max
tcatcatcatcacctacgctgccgctgccgccgccgccacttgatatggcttgttgttgttgcttgttccccactattggaagtggctccgtcagttct

SEQ ID NO: 703 - DNA, 99 bp, Glycine max; identical to SEQ ID NO: 702

SEQ ID NO: 704 - DNA, 264 bp, Glycine max
ccggaggtatacaccaaaggcttagtttcatttgcattaacatattaataataattcacaagagaagaaatataaaataagataaatcaattttttcacaagttaaattttattttattttttggaatttttacaagaaataaaaaaattcataacttaaaattaactcatgtatgataactttttaatagtttttttgtttaattttcctaaaagataaggcgtataaattaattttagtttacgagagaagttggatttgtt

SEQ ID NO: 705 - DNA, 115 bp, Glycine max
gggtacatcatccgatacaattactaaactaaactaagggaagaattattctcacttttatatttgttatttaaactatcaattctgaaatttctattttgcccactaaccaaat

SEQ ID NO: 706 - DNA, 104 bp, Glycine max
gatccacacagcaccttgccccatcaagatcaagcacccttgtttctcttttttggattttattgcaggttttgttgttgttgaatcgtatttctgttgcatca

SEQ ID NO: 707 - DNA, 143 bp, Glycine max
cctgaaatatgggtgtcttcaaattattagctaatatttattttttttaatcaagtagttgaaaaaaaaattcagtttcattttattatttatttatttttcatcaagtggtaatatgacatacggagtgttgcctcaacctg

SEQ ID NO: 708 - DNA, 105 bp, Glycine max
ggaacctttggcaactcttgcgaactgtctcagaaaagaataataaataaataaagccatcaaagagaccagaaaattctaccaattaggaaatcatgcaccaac

SEQ ID NO: 709 - DNA, 111 bp, Glycine max
tcagattcaaaccgaagaaaagggagcaattagggattattattattattattattattattaccagccgaagtcgttgccgagcgacatcgttttgctaccgtgagaagg

SEQ ID NO: 710 - DNA, 107 bp, Glycine max
tatcgtttcgtccctgtgtggctgtgtgtgagtgagagtgagagtgagagtgagggtggataaaacaaacaaacaaaactagcgcattttgttgcgggtggaattag

SEQ ID NO: 711 - DNA, 78 bp, Glycine max
aactcattggcaagtggactaaattgtcacaagtaataaaataaaataaaagtctgagtatcaagtccacaggagctt

SEQ ID NO: 712 - DNA, 93 bp, Glycine max
ccacaaatccaaattccaaattcatgttctaacctctaacaactatatatatattccttgtcatttgatgagtatgctttgatttcctatgga

SEQ ID NO: 713 - DNA, 140 bp, Glycine max
gtcggagtagtcgagtagacatagtggggggcgatatcgcgataggatttatcctctgggaggaataattaattaattggtaatatattattttttttataatattaatttattatataaaggtttcatcggactcggta

SEQ ID NO: 714 - DNA, 110 bp, Glycine max
aggtatgcgttatattcatattcatatttgtattttattatatatatatatatatatatatatatatatatatgtatacatattatagtaaacccacctcatactaatga

SEQ ID NO: 715 - DNA, 142 bp, Glycine max
tgagattagacattcacatttacaaaagataatcattttcataatagtttttttaatatatatatatatatatatatatatatatatatattattaagaaaatttaaatcttatgcatcaattacatatcagccctgctctt

SEQ ID NO: 716 - DNA, 108 bp, Glycine max
aacatgagagaattgggaaaacgcttttgttttttgatccattctcacatctgcgattttgcttctttttctttctttcttccatgtatgtgtttccaacctttcttc

SEQ ID NO: 717 - DNA, 202 bp, Glycine max
aggtgctcatacatccaaacacttacacacttgttttagtaaataatgttatattctatctcaaataaatccaatgtttagaataaatccttgattgacttattattattaatatgctcatttataaattattgtcaaagataattttgttgaacaaattttttaaatatttacaaaatatacgtttcttgcgttgtatatg

SEQ ID NO: 718 - DNA, 254 bp, Glycine max
ggtctgaactgacccatttaattaagaggttaggttcaagcttttttaaaaagcttattaaattaaatagatcagacttaggcttgttaaaaagccttataagtctgataggtcggcctatatatatatatatatatatgtatatgtatatatatatatatatgtatatatatttatattatttgttgataccaatttatacttatattattttttgggtacaattaatttttttttgaaaccagcagactttg

SEQ ID NO: 719 - DNA, 93 bp, Glycine max
acacaatcgccaaagagaaaaagaaccctcaaccaaacaacaacaacaacaaaaaaaaagccctagaaaagattttggagaagcaatttctca

SEQ ID NO: 720 - DNA, 178 bp, Glycine max
tttcattacgtgcgtttgtacaactactatgaaacaaacatgaaaaatgcacaatttactcgtagaaataataataataataaaaataaataaataaataaaataaagtattttttgaaaaataaaagattgttagtactagttactacggagtatcgtattcgtatcatccaccctg

SEQ ID NO: 721 - DNA, 178 bp, Glycine max; identical to SEQ ID NO: 720

SEQ ID NO: 722 - DNA, 122 bp, Glycine max
cgcgtctttctttcttcttcaactaatttgcattaaaagtatcctcaagtaactaagaaagcaatcaagaaagaaagcttcttgtattcattcattcattcattatgtgtgtgtgtgcgagt

SEQ ID NO: 723 - DNA, 97 bp, Glycine max
aagcaatcaagaaagaaagcttcttgtattcattcattcattcattatgtgtgtgtgtgcgagtacaaaatttatttctggaatctgaggtgtttca

SEQ ID NO: 724 - DNA, 129 bp, Glycine max
ttgctatgccaacaatgacaacccaacccaacccatctagagtacaaaacaaaggcaagacttttatgccagcttttcctatatctagagtagtactcctacaatcaaatgacaagcagctacaaccaa

SEQ ID NO: 725 - DNA, 109 bp, Glycine max
cacatcgtcatcccaaacccaaaatctatagttcttaactttctacaatcacaaacaaacaaaagcaatttaaaaccatagaatagaacacaacacccaataaagagca

SEQ ID NO: 726 - DNA, 159 bp, Glycine max
aacctcgagcatatgagaaaggggtatatgaatatactactattcgtattattatcaaatattaatatgttccatagaaatttacaaattatttatattctattattattatttagtaatagtagtatagtattagtaatgacattggatcgtaaatgt

SEQ ID NO: 727 - DNA, 150 bp, Glycine max
aaagggagagccatcatcattttattttattttttgatatagagagccatcattattgttgaaactaaagatttctcataacataaagttgtatactaagaaaatgattgatattcacttttagcattttctttgctttctccatttcca

SEQ ID NO: 728 - DNA, 130 bp, Glycine max
tcaggagagaaatgttgcttaaaaagaaaagaaaagaatgaacgacgctaaaactagattgtatgtgaatgatagacagaagaatattaatattgtaaaattgacctctttaagattgacccactcccat

SEQ ID NO: 729 - DNA, 248 bp, Glycine max
ccaagaatctgcttggaaaaagttaaatgtatactcaattttattttgtatgcatagagagaaatagacgaggaaaaatataaaagaaaagaaaaaaattataaataaaacaaacaacataataaaaaatgaaaagaagaatagaaggaaaaatagactcaaaatgagattttgaaattatataattaataatccaattaatctcatgagatattattctataactataacttatggaccgtttggaa

SEQ ID NO: 730 - DNA, 191 bp, Glycine max
ggaccgtttggaagagataaaaaaagaaaagaaaatattgattacaatatatttttctttgtttaattgaagaaaaataaagaaacaattgacttctaagaataaaaattcaaaacttttcttatgttttaacttttttttaatttcaaattttccttttcttgattttcttttcccactacaattgactg

SEQ ID NO: 731 - DNA, 103 bp, Glycine max
tgcataactcgatctcttgatgatttctaccaattggcctcggccttatatatatatattctcattctcatatatatatatatgtgcgtgtagtttacatgaa

SEQ ID NO: 732 - DNA, 126 bp, Glycine max
tgcataactcgatctcttgatgatttctaccaattggcctcggccttatatatatatattctcattctcatatatatatatatgtgcgtgtagtttacatgaattttgcaggtgattattatttga

SEQ ID NO: 733 - DNA, 162 bp, Glycine max
ccattgccctgcatgtacattttattattagtttgtttgatgattttggaattttgtggtttaatttattaatatatatatatatatatatatatatatatatatatatgtatatattttgaaggaattgaggagcggagtatatacgatgcagttcggatt

SEQ ID NO: 734 - DNA, 140 bp, Glycine max
tcaatcctgctagataaatgcttttctatatatacactgacagaacagttttaatgcttttttaattttttcctgtttgtaataatgattttttgtttgtttgttagaaattgacatttttttcactttaatcatgggct

SEQ ID NO: 735 - DNA, 141 bp, Glycine max
tggtgaatcatgtgcataaataaattattgatcttttaataattatttttaatggattcatcaatagtttttctcagtatccttctacctctagtaatatggccatcatcatcatccttttgatctactctcttaattggt

SEQ ID NO: 736 - DNA, 93 bp, Glycine max
tggtggttagatccaatttcatgttgaatttaatattgtggaacaaaaaggcggtgttatatatatatatatgatggtcgatggtgcaagagg

SEQ ID NO: 737 - DNA, 158 bp, Glycine max
ggaactgtacacatgccttaatataatattattttattatattatatatgagtatttatatttttttaatgtgatggaaaaaagaagataagaagaaaaatcaggtgagatgatacaagaatatatatatataataattccaaatgaaataccacaaa

SEQ ID NO: 738 - DNA, 96 bp, Glycine max
ttcgagtcattccagtcgcagtaacgaaaagaagaatatataggaaggttcatgatatatatatatatataatcatatcgtataactttcataact

SEQ ID NO: 739 - DNA, 431 bp, Glycine max
attccagtcgcagtaacgaaaagaagaatatataggaaggttcatgatatatatatatatataatcatatcgtataactttcataactattatattattttttaacttttaattaaatatttaatattttcttaaaatttatcattaaattcaaaattcattttatataaattatatatacaaaatctaatattaatctaaaattatttattattttgtttatatagattaaaattgatctatatgaatattttaaaatataaattattgattatttttttattgttgttcaattttaataaaatttgattcaaatgatagtaataatatatagatataatttaacgattagattaataaaaaaaatatattatatatatatatataattataaaaattatatttgtataatttaatccgactttgtggct

SEQ ID NO: 740 - DNA, 104 bp, Glycine max
aatccgactttgtggctatatatgtgtgtgtttttgttcatgttgtatttctttctttctgcaaaccatatagcagtataagtgttttgtaatgtacatcgggc

SEQ ID NO: 741 - DNA, 169 bp, Glycine max
aacagatcactggtatgcaaaatccatactatatatatatatatatatatatatatatatatatatatatatatatatatatatatatatatatatatatatatatgataagaacctcctcccttactactccctatgcattagttgttgactaacgccacttaccacc

SEQ ID NO: 742 - DNA, 83 bp, Glycine max
ttcagcatttcgtggtggcaacacttaatttgcacagataactctctctctctctctctctgaattacccaatgtcttcaaca

SEQ ID NO: 743 - DNA, 267 bp, Glycine max
taactcttgcgtgctccttgtttcaaacaattaaattaatataagggtatttgttagtgtttaggatattggttaagaaatcaatatatatatatatatatatatattgtataaattataagagaatataaaaaaattatgaatagtataattttttgtttttcaatttttaaaattttaattaaaggaaaattggttatatttaaaattattctttatgtagaagaaaaattgataaatgattttgatccagtatatgtcccaggg

SEQ ID NO: 744 - DNA, 161 bp, Glycine max
tttctgaaatgtgttgaaattttttaatctgttttgaaaagtagtttccaaaaaagagatacttgtagaagaagaagaatatatatatatagtattagtaaatctgggaggtgtaaataacagttgttaccacctaatcttaggctgtaacttggtccacg

SEQ ID NO: 745 - DNA, 161 bp, Glycine max; identical to SEQ ID NO: 744

SEQ ID NO: 746 - DNA, 172 bp, Glycine max
ggagatcctagacacttatggaaaagtatcaagacaacttatcaattttcaaaagtctgaaatctttttgagttcgattattcaacaacaacaaagacacaaaatctcttcctaggtgtcactaaaagcattggatccaacaaatatttaggacttccttcaatcattggca

SEQ ID NO: 747 - DNA, 129 bp, Glycine max
aaccattgatctccttacctattcttaatttagtttttataatatagagcatttctaattgtatcgctatatatatatatatatataaataattgtatcgctataatttattcttaatttggtacccgt

SEQ ID NO: 748 - DNA, 189 bp, Glycine max
ggaaccacaactccgatttatcccataacaataagtaaataataagtaaaatggacatgagttttagcaaaaaaaaatagaaaaactaagcatactaaaacattatcattttaagaaagaaagaaaaaagactatcataactgattaggatcataaaatttcctgaaactccaaatttcttctttgtgc

SEQ ID NO: 749 - DNA, 111 bp, Glycine max
ccgaatagggtaatgggtagccaagagagagagataactgaagggtaagaatcagcagaaatcatcagaaaggatatgaaatgttaccaagtcaagtacaggctaccaggg

SEQ ID NO: 750 - DNA, 166 bp, Glycine max
tgattcaatacaaaggaaattaagtaaacactaactcaacattctaaattttctttacttttctctattaatatttttttaaaaagaaaattcttctcacatatacaaagagtcttgagggagggagggagggcaatgcccccccttgaatccgttaccacagggt

SEQ ID NO: 751 - DNA, 415 bp, Glycine max
tgtgccaataatgctcaatttaaaatttatttatttaacgtaaaaaaatggcaaaaaataattatacacagaaagaaaattaagttactctaagataatctattgataacattactacttttaataattatttttcaatattaattttattattttaaccattaaattaaggtttaaatatttttttagttcttattatttaatgttttttttagtcttaaaaaattatatttattttatttttagtacttataatattttaaataatattttgaacagtaaaaaaatattataaaatatcatatgaatcaaaaataaaataaacataattaataaggactaaaaataaaaaaaaaatataataataaaaagaaaaaaagtactaaattacagcactaaagaaatattaaatctt

SEQ ID NO: 752 - DNA, 185 bp, Glycine max
aaattaaagttgggttgaaaattcattaaattaaagttaatttttagcaaataaaatatacatttttatttaaaactaaatttatttaatacttcatttgaccaatttaatataatataatttaaagtatgtttctcttcattataaaattagaaaagtttgatttttgacccaacgaaacttgt

SEQ ID NO: 753 - DNA, 420 bp, Glycine max
ccttaagtggagattcatggtatatgtatgtgcattttaaataattgaccttaactctagatcaaattatgatatattttaattttacaaggattaaaaacataaaaaaatagtatggacaaaaatcaaactcttttaattttataaagatgaaaaatatattttactttataatatgtatatatatatatatataatagtttttttaagaaaagtataataaatattaactataagtttttataattattaagctaatgttaatatattcaagaattcaaataattaatattttacatatattggctaaaaaaaattacatatataattgattgcatagttaaaatgagtaattgatccaaaaccgatcaaaacctttgattataaaggggaaaaaaaaccttgttgatgttgataggg

SEQ ID NO: 754 - DNA, 94 bp, Glycine max
tcgtcagcttgaatgacacttggatttagacaaaggttttttcataataattataataataataattttcacgtaaggttgagcataggacgag

SEQ ID NO: 755 - DNA, 331 bp, Glycine max
ttcgaaacgtgtcatgtagagtaattgttataaatttttataattaaaaaaaatgttttattggttataaaaccaaacaaaaaatgattccattaaactgtattattatttttgtattagataaatgattattctccctaaaaacattaaatgctctttattaatattttttcatttaaaataaataaataatctcaacaagttatagttattctaattaatttaccaataaatcaaatgaaattatatagatattttaatatttatccaattataaatataattatttttttatagatcacaattattttttcaccctttgagtattcga

SEQ ID NO: 756 - DNA, 120 bp, Glycine max
aatattgtgcaaatgggttttggggatttcacttacttaatatgatttagaaacattattattattatttctgtaaaaaaaaagaaatattattattattacaatttcttcatccttctt

SEQ ID NO: 757 - DNA, 122 bp, Glycine max
aatattgtgcaaatgggttttggggatttcacttacttaatatgatttagaaacattattattattatttctgtaaaaaaaaagaaatattattattattacaatttcttcatccttcttat

SEQ ID NO: 758 - DNA, 133 bp, Glycine max
tgcacaatgagatttgaagtcatgtaacgatcaacaaataacaagaataatataatcaatcatgtaaaataataataataataatagaaatcaagaacaagtatgtccaaaaaatttagggagggtaatcgaa

SEQ ID NO: 759 - DNA, 209 bp, Glycine max
ttgtttaattcactttaaagaagccattatttatttattttttaagataattttttaaaaataaatatttatttcttaaatttaatatattttcattaatatataagaagatattgtatttttttaaaaaaaaggaatccaaatatgaaaaaatatgttggatagctttttatctgtaaatagcttattagatggtccatgagatttga

SEQ ID NO: 760 - DNA, 125 bp, Glycine max
cgaaattgatttccatcgatttctctctattttttcttttctaaattatattgacaactatatatatatatatatatatatatatattatgtaacaaattttatgatgcagttagataacaagaa

SEQ ID NO: 761 - DNA, 146 bp, Glycine max
tggaaggattggttgagagggtttttcttatttataataagtatcatttttatactaaaatgttcttttttttttttttgcgtgtgctttagtcaagctctctctctctctcaaatttcataaaatttgtgaattagtcaatttcg

SEQ ID NO: 762 - DNA, 97 bp, Glycine max
aggatctgccaattctgatcataacaatcaacgcaagtattcgatttcaataataataataataataataataataagatgggaatgcataggtaca

SEQ ID NO: 763 - DNA, 167 bp, Glycine max
ccatgttggcatgaagatttgagcgggaaaataataagacaacatacataacgttttctcaaagtggtttttttattttattttttttatcataaggtttggctttttagttttttatttttcagtttttgtggataattctattaactgtcaagggaggaaattgg

SEQ ID NO: 764 - DNA, 113 bp, Glycine max
ttggttgtactttgccaactaaatattatgacatcaatagatacttagatagatagatgcctttatttatctttgttttgaactactatgattactggtactttcttctggca

SEQ ID NO: 765 - DNA, 107 bp, Glycine max
tcagtcattgtctttgaggactttctcattattattggattttaatcaataacttcttctactgtcttcttgagagagagagatgggggaaatttgaaactgcattc

SEQ ID NO: 766 - DNA, 123 bp, Glycine max
gcagcaaatgtctcgaatacttacaatccgtcaggcagctcgatgcttgcttgctttgggggaatatttccaacgcctgagggctttgagctcactgtggtctaatagacctcgtgaacctgc

SEQ ID NO: 767 - DNA, 135 bp, Glycine max
tggatctgattccacctgaaaacacaattcagcacaactgagaattctgtattgccacaaacttaattttagtttagaacttatttttacttagatctttatatatatatatatatacaacttagcgcccataca

SEQ ID NO: 768 - DNA, 95 bp, Glycine max
agctgcatcacctctcagtttctgttagtttagccaaatgcatgtatataggacaaatatatatatatatatattagctaaattgaaatcagggc

SEQ ID NO: 769 - DNA, 149 bp, Glycine max
cagggctacatttaaggacaaatatatatatatatatatatatatatatatatatatatatatagatagatagatagatagatagatagatagatagatagatagatagacatgtacagcataatcaagttgaccaaatgcctagaaca

SEQ ID NO: 770 - DNA, 147 bp, Glycine max
gggctacatttaaggacaaatatatatatatatatatatatatatatatatatatatatatagatagatagatagatagatagatagatagatagatagatagatagacatgtacagcataatcaagttgaccaaatgcctagaaca

SEQ ID NO: 771 - DNA, 100 bp, Glycine max
agcaacgctggattagaacaaaatataattattgtttatttttctttctttctttctttttcattttttaatgacatctttttccattgttgtaatggca

SEQ ID NO: 772 - DNA, 269 bp, Glycine max
caccaaacacctcctcaattgtagacctgtatttcaaatattaactatatgaaacttcaattctaattgaaaaataacaaaacaatacttatgaattatatgtaagtgttgtcctaaactaaactaaaccaatcaacaaagaaaataactcaaattctaattgaaacaaatgaaaagatcatttcactgttctagataaattttatgatatataatgtaaaagtgaattaatacctaaattaagatagtacacaggcaaacttcaagaa

SEQ ID NO: 773 - DNA, 163 bp, Glycine max
agattagggaaccattggatgattgattgattatgcagttctttagctgttctgaagtttcatttcactaacctatgtatccttacatttaatgtaacttttattatgtaattttgttgacagattttataatgtaaattactgacacgaaatttctatttgg

SEQ ID NO: 774 - DNA, 96 bp, Glycine max
ccttgagtcgtccctgtaatctagctaaagtaaatgttgcgtgcgttcgctattatatatatataattgacaatattaaccattaaccacaatgca

SEQ ID NO: 775 - DNA, 95 bp, Glycine max
cctgtgaagggtgctgtagtgcttgaaacagttgcatcgtttggccttatgttcttcttcttcatatggtgtgttaaaatggatgttgccacatt

SEQ ID NO: 776 - DNA, 189 bp, Glycine max
taaaccgttctcgtcgaataataccgattcgacaaataaaaaatgaataaattatattggcaaaaaaaaaaatagaataaattatactttattttccaactatttcttacttttttagttttctctctctctctataagttatatatttatatacaaaaagacgaaattcgtaaggcaatcttattggt

SEQ ID NO: 777 - DNA, 195 bp, Glycine max
cgaaattcgtaaggcaatcttattggtattataattttctctactgattatgtctaaccatttatacacacacacacacacacatatatatatatatatatatatatatatattattacttgttaaataaaatcagaaaaatgttgtaatcactttcaaaactgtagttaataaaccttaactaaatcaagcaaa

SEQ ID NO: 778 - DNA, 130 bp, Glycine max
acacacacacacacacacatatatatatatatatatatatatatatattattacttgttaaataaaatcagaaaaatgttgtaatcactttcaaaactgtagttaataaaccttaactaaatcaagcaaa

SEQ ID NO: 779 - DNA, 98 bp, Glycine max
cgtgaagatgaaggatgaaaattggttaagttaggttaggttagattttataaaatatgtatgagtttgatttgttttttaaggttcgagcttagttt

SEQ ID NO: 780 - DNA, 170 bp, Glycine max
tccctaaataaattaataaatccaaacttatatacaagttaataggtttaagtcttaatatatatatatatatatatatatatatatatatatatatatatatatatatatatatatatatatatatatatatatatatatagagagagagagagagagagagagggtca

SEQ ID NO: 781 - DNA, 242 bp, Glycine max
tccctaaataaattaataaatccaaacttatatacaagttaataggtttaagtcttaatatatatatatatatatatatatatatatatatatatatatatatatatatatatatatatatatatatatatatatatatatagagagagagagagagagagagagggtcattttatacgagtgagaaaatttaaatattattatgaattgtcaaaattaaaatacacacatgccacatgatt

SEQ ID NO: 782 - DNA, 87 bp, Glycine max
tttctatccactttatttatcacctatttctttctttcttaccgaatactaaacaagccttgtgatccgaaagcccgaaacaatcat

SEQ ID NO: 783 - DNA, 132 bp, Glycine max
aacaaggccacactctcacagcaacttctcgatctgattactctgaactttgtctccaaatgggcatccattttttcaggtaagtcaaaccaaaccaaaccatgcataaatacatacacacttgcaccattt

SEQ ID NO: 784 - DNA, 145 bp, Glycine max
tttcagctgctactcaaagtagcttctgaaaataatcatatagatagatagattctgattttttttctaaaaaaaaacttaaacaaacacactaagaaattttagaagtgatttttcatgaaaaaagttgaaacaaatgggctct

SEQ ID NO: 785 - DNA, 101 bp, Glycine max
aatggacaatgagaggacataacaacaacaacaccaccaaaaccttatcccactaggaatgagaggacataaagggctaaaaattggaaggagggtctacg

SEQ ID NO: 786 - DNA, 114 bp, Glycine max
gccaacggttctcctatcaccgtcgcgtcgtaaatcctcgaagttatcacttcctcctcctccttcttcttcggcggctcctccggcttcggcgccgaagccagaggagattcc

SEQ ID NO: 787 - DNA, 123 bp, Glycine max
tttcaactgccacacaaaacacgaacaaggattcctttattttcagcattacaagattccataattattattattattattattttggagaaactttttttttttcctttcaaatatcccttt

SEQ ID NO: 788 - DNA, 151 bp, Glycine max
caaatattccctctaacataacataaaacatatatatatatatatatatatatatatatatatatatatatatatttgtggtagaaagaaatattagttttagttcgacatattataagatattagtttctttatgtgaaattcatgttct

SEQ ID NO: 789 - DNA, 286 bp, Glycine max
aaattgtaagaggaatgagtgaaaaataaataaataataaaattatgttatatttaaaaggaataataagaatatttaataaatattttaagaattaaaaaataaaatataaaagcaaaaaattagaggctaaaaactagagttttaaaaaagttactttaaataatgtttcagaaaataataaaagttacaaaaaaatacttatttattaaataattaaacaagtttttcaactaataaaaaaataaaactaactaaaataacgtatcaaacatagcctaaagcg

SEQ ID NO: 790 - DNA, 152 bp, Glycine max
cgcaactcagatgcattaacacaaatatacacacacacacaaataaatagagagagacatacatacatactttaaataaatgcacagtatttattaagagacattgattatcttacactaatacataactatatcagtggacgatgatcatt

SEQ ID NO: 791 - DNA, 152 bp, Glycine max; identical to SEQ ID NO: 790

SEQ ID NO: 792 - DNA, 138 bp, Glycine max
tgattgcagagcatcctttggttatatatatatatatatatatatatatatatatatatatatatatatatatatatatatatatatatatatatatttgtagaaacatgaaggatacattcaactgccttcatgaaa

SEQ ID NO: 793 - DNA, 104 bp, Glycine max
ggcaaagcacgttcataacaaaaaaaaaatgcaggtagagatgaggagagagagagagttacagtgaaaggaacgaatggcaggcgaggattccatgggaagaa

SEQ ID NO: 794 - DNA, 220 bp, Glycine max
ggaatcaagtgagggagaaactcatttttcaatttaactttaaaaaccaaaactaaaaaacttacaactatacattgtattaattagcatgtgttttatatatatatatatatatatatatatatatatatatatatatatatttgagtatggaaggagtactctattcaatgagatgaatatgtgttaacaaaaagattgattaggcgattaagaaaga

SEQ ID NO: 795 - DNA, 142 bp, Glycine max
tttaaataaattgaccctaaattgtacacaattaattaagaaaaacagttactcaacatatatatatatatatatatatatattacaatcttatttccttaggtgagatgaattagatagatcacatatcatcatgactcga

SEQ ID NO: 796 - DNA, 145 bp, Glycine max
tttccaatctaaatccaaaatattgagctataagaaattgagtttaagttgaacaaaagtatatcatagaaggaagaatttagagaaaagaaaagaaaaaagtacataccacaccttgtaaacaattcaagctaatgagcccaaa

SEQ ID NO: 797 - DNA, 96 bp, Glycine max
gttgttagccatggatcgaatgaagcaacttaattaatataactctctctctctctatctctctaattcggttgcattcaggtgtggcttcacatt

SEQ ID NO: 798 - DNA, 175 bp, Glycine max
aaacgcattccgtacattataaataatattatatacgtcatatttacatcattttttatccttgtttatctcaaaaaagtgtaaatatagagagagtatatatcatatcatataatatgtaagtttttattagtttaaaaaaatagcttgagagtaatgtgatttgtcatgtgct

SEQ ID NO: 799 - DNA, 158 bp, Glycine max
tgtgatttgtcatgtgctaataaaatatcattttgaatgctcttttatccacatatattaattgttaatgattgaagtttattattattattataatatccttttaacgatgaaagtttgttttaaaaaaatatagatttaagatgtgtttggaggaa

SEQ ID NO: 800 - DNA, 237 bp, Glycine max
tggttccataagactctcgaacaaaattacttccaataaaatatacatgtggtttataaaaaacaattccatcaaaattttccaaaaataatacaaaaaggatacaaatattttttttaaaaaaataattcatttattttgaatacatgacttttatatatatatatatatatatatatatatatatatcaaccgggacatagtaattcaagactacttaatgttgttcacccgtga

SEQ ID NO: 801 - DNA, 366 bp, Glycine max
tgagacatacatgaatttcagagaatattttcctatataggttattagcatttcttttaatattttttttattattgtcttatttttaaaaagttggcattctttttaaaattgacttttttgagatattgaactattttaataataataataaaattaagttatatagtgtattaaaaagaataagataaaatgtgttttaaatttctcaagactttagtcaaaattagtttcagtctcctctattaaaaatgtgttttaattctcatatttttaaaaatatggtgaatttcatttttaatcttgaacagttctttaattttgacttaattaaattcaacatatttcagaaacacgggaaccaaa

SEQ ID NO: 802 - DNA, 91 bp, Glycine max
attctgaaccctgcatgttcattctctctctctcacgctcgcaacccgcgcgcgcacctacacttcttttatgtcatcacgtgctccttct

SEQ ID NO: 803 - DNA, 172 bp, Glycine max
ttcaacttgcaacacacgcacacacacacactcacacacactgtttttttgttccactaaatcaaaacctcttatctcttactctcattacattcattcttttgattttcgttatggtagtagcagtggagaaaaccaacctcacttcacaatcacaatgcttcaaccgtgt

SEQ ID NO: 804 - DNA, 135 bp, Glycine max
cccaacataattccaacttcaaaattcactcaataaaaagtttaacatgtaaatttacttggaaacaaaactcataaccaataataataataataaaagaaatcagttttatagcattaatttgggatgctctgc

SEQ ID NO: 805 - DNA, 111 bp, Glycine max
aggcttcttctgtctcaatttattttacttctaaagcaacaatttctttctttctcattttttttgtaccctctgatcagatcgtagtccgatcctcaagccttagcctct

SEQ ID NO: 806 - DNA, 285 bp, Glycine max
tgcattggatgttctaccatagtacattgctttatgtgaaagtcttttaattattcaatattgacatgttcttatatatatatatatatatgagggattgtattatctctgaaaaaagattttatcataaaatcataatgatttctcataatgtatctttacattttaaagttagataaataaaattgattttaaattgttagatataattaaaatacataattaatatgacttttaacaaattgatatataaacacttaaaaaaaagtttcatgacgtacggtg

SEQ ID NO: 807 - DNA, 85 bp, Glycine max
aattgaagggctagctcaatcaagctaaacttgaattcaactatagaaattaaattaaattgaaatttggttacacgagtcagga

SEQ ID NO: 808 - DNA, 281 bp, Glycine max
gcactaatggtgacacacactagtataaaaatacttttaatatcagttattttagatttttttgtttgtgtaagtcaatcaattttaaaagttacttctaaatcaactttaacaaaaactaatgtagaaatgatctagaaaactttttttttaagttctaactctttttcatcaatgttatacatatatatatatatatatatatatatcccaaaataaccaatcaaataaactacttagtttacttatatgttaaatcatcgacctattacaagagagga

SEQ ID NO: 809 - DNA, 131 bp, Glycine max
tttaaagtctcaagtcattggatattatcttttttaaatatatatatatatatatatatatatatatatatatatatatatatatatatatatatatatatataaattgaacatttgttgttatattagct

SEQ ID NO: 810 - DNA, 209 bp, Glycine max
agagtctctctctaccatgtgaaaaataatatataaataaaaacatatatactctaccatgtgaaaaataatatataaataaaaacatatatacactttttacttcttgacattctaattttttttacctttctttctttcccatgatatttatcatttattctctcctctattctcatttatctatctcccaaggtgtgtacattcca

SEQ ID NO: 811 - DNA, 127 bp, Glycine max
tctcccaaggtgtgtacattccattagaatgtgaaaatgaaaaacattcacaagcataatgtaaaaaaaataatattatttctcataaccctatatatatatacacgccacataatacgtacgaacg

SEQ ID NO: 812 - DNA, 171 bp, Glycine max
tggtaacatggaggcaactatctaaaaaagaattgagattatttaaaaactaataagtgattgtgatagttgtgattaattaattaatactattgaagcaaagagacaatatatatagaaattgtggttttctgttgtttaattttgcttttggacaaagattaaacggtt

SEQ ID NO: 813 - DNA, 97 bp, Glycine max
tttcatttgtataatgtcctttttataaaaagaaagaaagaagcaaactcaatcatttgatgggtgtgttaattgttaattgtaggtgcatggcttt

SEQ ID NO: 814 - DNA, 317 bp, Glycine max
tttaagtgttgaaatttccttaaaaaatagtttgattgattgatataatatttctttattttgatatatatatatatatatatatatatatataacgataattgatagtaaaattttacttttacttttaaatacatatataaaaattaaggaaatagtatgtgattaattttactacttttctataatatagttgaaaataagaaataaaatcaagacacgtacttgtttgctattattatttaaattagaaaatgaaataaatattttattgaacctaaagtgtctttaatcatttagcatggagatcatttgga

SEQ ID NO: 815 - DNA, 317 bp, Glycine max; identical to SEQ ID NO: 814

SEQ ID NO: 816 - DNA, 214 bp, Glycine max
ttgcatcacattgttaatcttttacattaatttaaaatataattcacatattttattttttatttattatgaattttaattataatacatattcaaaattatttatttattataaattttagttaaataaaataaacatttatttttcaaattctacaagctaataaactagtattactaaatgcatagagtatgagcaaattcgtgtaggtgg

SEQ ID NO: 817 - DNA, 171 bp, Glycine max
caaagactcctgcccttttctatcagctaaaattatttatgtacaaataaaaaaggtacaaacacaacatttatttatgaacagataaacgtttttgtgagacattaactgaacctactctatcaagcttattattactactactacttatcttcactccaccacactgtg

SEQ ID NO: 818 - DNA, 126 bp, Glycine max
acacccacgttgaaatacatgttgttgttgttggacgcgcccagccgagagtgccggtccacgagtatccccaacgtgcatggcgcatgcgcttgaaacctagtattcatcttcctgatggaggct

SEQ ID NO: 819 - DNA, 248 bp, Glycine max
cttcaaattggcgtcttttttctcgttttggttcccagtacttaagtcataataataataataataataataataataataataataaaagtttaggaagaaaaatgagaaaactaattagtttcgggttttatttaaggtttttttagtttcagaaactaaaatgacatatagatacaaatttaaagattaaattcgtcatttactcattttttattagacaaaatttaggtttaagcatgcatacc

SEQ ID NO: 820 - DNA, 114 bp, Glycine max
aatgatcaccacagtaatatcaatcacaatagtcaaaataataataataatgaccttgatgtgaaaactgctaaagtgaattttatataaggaaatcattctcatatagaaatg

SEQ ID NO: 821 - DNA, 151 bp, Glycine max
tgagatgaatagagaaataagaaaagaataatttttgaatgataatataattaattaattaataaatttaatgtgattaattaaattaattatttttcttaagacacataaattagttgaaaggtaattgtaataagggacagacggagtg

SEQ ID NO: 822 - DNA, 164 bp, Glycine max
ccgacatgatgacaatgatgacgatttgtgataattgttgcaaaaaaagtgaaaagaaaataaggggttaaagagagagagaaaattgtagcctttcaatatttttttaaatttattaaaagggaaaaaaacttttatagctagcttaccaggacgttgcagat

SEQ ID NO: 823 - DNA, 144 bp, Glycine max
tacgtggccacttgatctataagagagttctaattgaccaattaattagtgaaaacatataaaaaggaaaggaaacatttgtttccttaagaatgaagaaaccaaaaagaagtaaagaagaagaagcaagggaaagcaaagaag

SEQ ID NO: 824 - DNA, 107 bp, Glycine max
tgctagtcacaaccctcttaacttgattttaaaaataaaataaaataaaaaacctcttaacttgcttcaaaatgaaacctcttgcattaatccaatcgtgcattgaa

SEQ ID NO: 825 - DNA, 356 bp, Glycine max
agtggtttgcatgtttggctcgcattaaatttaataatatctaaaaaacattgatgataataatatctaaatttacactaaataagctaagttaaaattattttaaggcttatttaatgattatactacaaaggttttaaatcatttaagaaatctttgactacaaaaaattagcttatttaaatatataacataataaaatataatatatatacatatatatatttattatgttatattatattatatttttactctaatcttaaaattatatatatatatatatatatatatatatatatatatatatatatatatatatatatgcatgcgcgcgcatgagttaattgaagtgg

SEQ ID NO: 826 - DNA, 356 bp, Glycine max; identical to SEQ ID NO: 825

SEQ ID NO: 827 - DNA, 356 bp, Glycine max; identical to SEQ ID NO: 825

SEQ ID NO: 828 - DNA, 223 bp, Glycine max
aacattaaatgatcaaaggacataaaattaattaattaaattttgacataatttaaaataaatttataaatctcaatttttttctataaatcatttaacttttttataaatacttataaacttaataaaaattaatatttttgtatatataaaattcttaacattgtaaatttataattaaaaaatctataagtgaaaagctaaaaaagagttgggcctagct

SEQ ID NO: 829 - DNA, 143 bp, Glycine max
atccgatgaagaggaaccccgagatgctaattaccagtcagtaaattgatttgcttttctgaaaagaattatatatatatatatatatatatatatatatataaagttggtaaaaaaagagtttaatgattatgagtgtgaaa

SEQ ID NO: 830 - DNA, 117 bp, Glycine max
gtctccaacaccctctcatatatatgtttttgcttattattcaacatcatcaacaaatcacacacacacacaaacacaaagtgatatatatctccggagagaagaagaaacaaagag

SEQ ID NO: 831 - DNA, 125 bp, Glycine max
ctccggagagaagaagaaacaaagagattcatttttagttactattatttttattataaattaaataataataataacaatgccttcttctcttcagttggataggttcaatcctatcaccgacg

SEQ ID NO: 832 - DNA, 260 bp, Glycine max
tgagctggctggttagttaaatatatatttttacttattttaatacaaatgctaattaacttgttgacccaacatattatttaagaaaaataaaataaaaaatatttttattagaaaggaaaaaattatgtttttgttgattttttatacccttttaaaatttatataataaatatttttctcatttaattttttaacatgtgctaagaacatttatgagtaatatttttatttgtcatattttgaagagggagcgaaag

SEQ ID NO: 833 - DNA, 152 bp, Glycine max
acacacactgaacttgttcctaaattatattgagtaattaactaccaaagttatatatatatatatataatattagtcatctttcaaaagtaaattatatatattgattaaccatttgatattttctgagcgtggaaatcggtgaaacggtg

SEQ ID NO: 834 - DNA, 145 bp, Glycine max
ccgaatgacagagaggaagaagaaaaaaattaatgatgaaaataatatttgtctttgcagttttattagtattattatttttattattaagaagtagtatatttccaaggttgaaatgtttttgagcctttgagggtcagtggtg

SEQ ID NO: 835 - DNA, 94 bp, Glycine max
gtggtgtgggaagttgaaatgttgcttgccttcacagctaagcgagcgaggaagattgagaataataataataactttccctgttcaaatagga

SEQ ID NO: 836 - DNA, 148 bp, Glycine max
aatcatgggccaactaaaaatgagtaaactaacaatagtaatgactaatgagttgtaatattaatcttcctcaaaagtaaataaataaatgagttgtaatagtcttttgttctattgctaattgtacacatttgatgattgattccag

SEQ ID NO: 837 - DNA, 87 bp, Glycine max
acatttgatgattgattccagttttgcacatacaatgcatacattactttttttattattattattatatgctcggtctaatttgga

SEQ ID NO: 838 - DNA, 97 bp, Glycine max
caccttcatattgctctttgttttcaactttttccaagtcattgttcgtattcttggaggagagagagagagaatgataggatgccagcaagataaa

SEQ ID NO: 839 - DNA, 172 bp, Glycine max
aatccgggaaatgattctaaacatgaatcaaggaagactgaaatatgaaaattcaattaataaaacaaattacagaaatatatatatatatatatatatatatcctaacaatcaaaaggttatggaaaacagagaaacaagaagaaaagacggaacagcgtcaaataaacgg

SEQ ID NO: 840 - DNA, 112 bp, Glycine max
acggaacagcgtcaaataaacggggagagagagagggttaagggcagatcaggaagagacccatcttcgctgaggatgccgtgagggaagttgcgaatgggagaagagaggg

SEQ ID NO: 841 - DNA, 114 bp, Glycine max
agaattggcaaagtgcagtagcggtggcgaaggttaggtgttgaagaagaagaagcgtgaagaaagtgacgatgatgatgcgttgagccaccattgtcgtcattgtttgaaggg

SEQ ID NO: 842 - DNA, 71 bp, Glycine max
tttgtcagtgtcttaccgtttacatatttgattatttatttattttgccttatagtctgccagggagaaag

SEQ ID NO: 843 - DNA, 119 bp, Glycine max
acttggagtctcgctcctatttcgagtcctttcactaccctttcaacaaagcttcttcttcggtcaacaattcttcttcttcttcgttgcccaacaggcgcagattgcttgtgtgccat

SEQ ID NO: 844 - DNA, 147 bp, Glycine max
gcaaggaagaggtgaacaacacaaaatctagctctgaacccccatcgaagaaataattttctgcaggataacttaaaagcctaaacaagaccctagcaatcttcttcaaaaataaataaataaccttaacaatttcccttctgtgca

SEQ ID NO: 845 - DNA, 237 bp, Glycine max
cttcccaacaactctatttgatataaggtttgattttttttaaaagaaaaaagtttgtttttaaattaaaaaactggtttataatattttagattaactagacaagtttttaattgtattaaaaaattattgtttttaaaaaagttaatattggtttctgaaaaatcaatttaatataacacacacacacatttaagaaatacttttaaaaaaaaaattgaacataggctctatgaa

SEQ ID NO: 846 - DNA, 112 bp, Glycine max
ccctaaagctggcttcgagggcagcaaacctccagcaagaagaagaagacacagaggtaagaaaagggaaatatcattttctcattcatccccttgcttgttatttacatgg

SEQ ID NO: 847 - DNA, 137 bp, Glycine max
aaagcaccaattgttagggtatgaaccctaaagctggcttcgagggcagcaaacctccagcaagaagaagaagacacagaggtaagaaaagggaaatatcattttctcattcatccccttgcttgttatttacatgg

SEQ ID NO: 848 - DNA, 183 bp, Glycine max
tttgttcgggttcacattgtgatatggaaaatttagtatcaataattgcattcaaattcatggaactaccattttttcctagcctcccccttcaggatacatcacacacacaccgtgaaagttaaaaagttaaaaggttagaatttttgacatagcagttatgtttcatgcacacatggtgat

SEQ ID NO: 849 - DNA, 201 bp, Glycine max
atgattcgggccatattttaatttagaaaatgaaaatattttttaatataatcttgttttttcataaattgttatgtttatcttttgagaaaaatattaaagcaactttttaagtttttgtttttaattagaaaagcatttaattattattatttttaacatattgttaattgaaaaaatatttttgccattggtctgatt

SEQ ID NO: 850 - DNA, 196 bp, Glycine max
ttgaagtgtcccaatggtaatgacaatttttttaaattaaacttatctgaacacttttttatacatgttagagagtttttattggatttttaatatatatatatatatatatatatatatatatatatatatatatatatataatacgaatgtatctgttttattcttgttaataatcattagcttgttatggaat

SEQ ID NO: 851 - DNA, 91 bp, Glycine max
agcgtattgcaacaaagggggtgatcatgaaatgaaatgatgcatgtagcaattgtttggtccttgccttttttggatgacctcggataga

SEQ ID NO: 852 - DNA, 271 bp, Glycine max
aggaaactttgagttaccaatgttaatttaaagtaaattaaatttataaaatattttaattcaaattaacattgatttaatccataaaaatataatagcttttactattatcctaaaagagtagttaaaaataaatataaaaatattaaaaaataatatttattattattaatatatttctaatataatttttaatatttttattttttaattatttttcattattcttgtaacagtcgaaaatataaaatgttctcaaacggagaatggc

SEQ ID NO: 853 - DNA, 154 bp, Glycine max
ttgtgcgcatactttgactcaattcaacaattatatatatataaatcaaagcgaaataaatgtctagtgtgcacataacagcatagtataaggacactctaaaaatggggatatatatttattgtactccttaattttatgcatttgaaccgtt

SEQ ID NO: 854 - DNA, 106 bp, Glycine max
cgcactcagatttggatttgattactactgcattaatatataaataattaattaattgcttgcatgcatgcatgcatttgtattaactagggctggatagctagct

SEQ ID NO: 855 - DNA, 106 bp, Glycine max; identical to SEQ ID NO: 854

SEQ ID NO: 856 - DNA, 114 bp, Glycine max
caagtgaatatgttaaatttggaattcaattaaaataaataaataaataaataaaacatgtaaaattaataattagattaaaattatagattttgtttgtggtactctggctca

SEQ ID NO: 857 - DNA, 87 bp, Glycine max
attagtaattcagccatctaaaaaatattaaaccactcactcactccatttttaaacttggtgaaatccttgctatcatttgggcat

SEQ ID NO: 858 - DNA, 94 bp, Glycine max
cgcatctctaccctcaaatcttcaccacacaacactacctcaattactcaactaaagcttcattcattcatcgtgtcgtgttgtgttctttgca

SEQ ID NO: 859 - DNA, 163 bp, Glycine max
acaggctatcatggctgaagaaggtaggttagttttgtactttttaagtgtgtactatatatatgtcttacatgccatatcctgttagtgaaacttgtattatgtgtgttgtgtgtgtgtgtgtgtgtgcttgtgtgtgcttacacacaagcattcagcatca

SEQ ID NO: 860 - DNA, 86 bp, Glycine max
aaactgggtcaacctcttaaccccatgatgattatatatacgttttgcgtgtgtgtgtgtgatcactcaatgtctgttggttgaaa

SEQ ID NO: 861 - DNA, 196 bp, Glycine max
catgcctgcttggtttatttcttgaaggatctggtgagttttttatactctttgcttgaataaatgtgcacagaattacatatttttgttttgttttttctactaacaagtagtgactagtgagagagagtgcttatagatgttctcttttgacaatgtacagagttaaaaaaaattcagaaggagcaacctttgc

SEQ ID NO: 862 - DNA, 163 bp, Glycine max
ccaaacctgggttgaacttgttttactaaataatttgtttaatattttaaaataatgtcttaattatattgaacaaaaaataatattatatattaataataataaataaatttcacttaaaagtgtcattaattataaattttttttaaccaaagcgatatcg

SEQ ID NO: 863 - DNA, 232 bp, Glycine max
aggtttaattacttatttggttcatgtaattttatcatttgtatcttttagtccttataattttaaagtgatttttttagttcttaatttgtaataaaaaaaatagttgataatttataactaatttgtagttaattatatatatatatatattatatattatagtaaggactaaaagataattaaaatataaactatagagactaaaaagatcactttcaaattataggga

SEQ ID NO: 864 - DNA, 167 bp, Glycine max
agattcacaccagacttctttttagtatcataacattttaaattctaataaataaataaaatattgttttcaattttatttttaggattagacaataaaaattaaaaggtccatttggggtgaatataaatatatttttaaataaatcacaagtacttcctcttctc

SEQ ID NO: 865 - DNA, 240 bp, Glycine max
tggatgcacatgaaatgagaaaagataaaagataagaaacaaaaatgggaaaattaaaattttattaataaaatttaaaatttattttaatgttggaagactttgatttagtaaatttcacacacacacacatatatatatatatatatatggaaatggtttttatcgatgtatcaacaaaagttgacccaaatagtaataatttatattttttaatcaagtgatttaagatttcaatcc

SEQ ID NO: 866 - DNA, 128 bp, Glycine max
aaatttcacacacacacacatatatatatatatatatatggaaatggtttttatcgatgtatcaacaaaagttgacccaaatagtaataatttatattttttaatcaagtgatttaagatttcaatcc

SEQ ID NO: 867 - DNA, 107 bp, Glycine max
atgattgggaaggaaagcttcattagatgtgataagttaaataatttaattgagattagttgtaataataataaaaatctttagaaatgcagcttgtgatttggagg

SEQ ID NO: 868 - DNA, 132 bp, Glycine max
tgtggcaactacctccaatttatcattcgtttgatttgaatatatatatatatatatatatataaagttctcaggaaaaaaattaaaataccatttataacagtataataataatgattagtcgtcggacct

SEQ ID NO: 869 - DNA, 119 bp, Glycine max
aaaggccaacagctacgtacgtacatggtagttcatattaacaaattatactaccatcattctgttggaaaaataaaataaaaatgaaggaaaataaatacgaagaagatgcacagtct

SEQ ID NO: 870 - DNA, 102 bp, Glycine max
agactatgcaagaagaaagtgataactaatttttctctctaagactgttggaaaaataaaataaaaatgaaggaaaataaatacgaagaagatgcacagtct

SEQ ID NO: 871 - DNA, 89 bp, Glycine max
cagcgaagcaatccattaaccaatatatatatatatatagacacacacattagtcacatgccaaatagtgggcaaatctcactcatgca

SEQ ID NO: 872 - DNA, 78 bp, Glycine max
gtgcatgataggctccaaaactcgctatttcatcatcatcattttatacgaaaacattgaccctaaaggcacaacaac

SEQ ID NO: 873 - DNA, 405 bp, Glycine max
ccacaacttgattcacaggaatagaaaaatgttagaaatatattttttttatacaattttaatataacatttattatcaaatcgaataaattatagtttatacatttttaaaaaatatacttactatgatttctcattagtcaatattgtaaaactttttacattagttttattattgaataaaataaataataaaagttatattatcattcgataaaaattagtatatatatatatatatatatatatatatatatatatatggtacaataatatatatggtaatttgcttaattattataataatcattttaaaaatgatagttattatgatttctcataagcttatcgtaaaaaaagttaaactaatttttattatagattaggcacccataatataaatcc

SEQ ID NO: 874 - DNA, 243 bp, Glycine max
ggcacccataatataaatccttttttcactatatgaaaaatttatatatatatatatatatatatatatatataaatatatatatatatatatataattaatttttacaataattattttaaatattatacgtattacaatatctcattactttacattgtaaaacattttacaatgaaaaaactcctagattctataaatattttcttttagagttacaattttattacacggcaactgacg

SEQ ID NO: 875 - DNA, 76 bp, Glycine max
atgtccagaggcagaacaaaaaaatgaatgttttttcttcttttcttttctttttttcattagggtcatcgtacga

SEQ ID NO: 876 - DNA, 89 bp, Glycine max
tggaagagaggcaaatcacatgtacataagggagataaaagaatgcgattttttcttttcttttcctgcggtgcttcgtttggttatgg

SEQ ID NO: 877 - DNA, 200 bp, Glycine max
ttgatccttgtccatccataataaattgattttactgtttctacttttttaaatatttaagtagttaaactcgacaaatatttggttcgttagacattaatttgaaaagacaaacgatatatatatacataaaaaacaatatattttttgttccatcattttgcttgcatgatttatttattttacgaattggacgatgg

SEQ ID NO: 878 - DNA, 103 bp, Glycine max
ggcttcctttgtgaggatagttggctcaaacaaatcagattccttggactttcctagcaattttggtggtggtggaggtggaacttcttgttcctggagctca

SEQ ID NO: 879 - DNA, 91 bp, Glycine max
ctgatgctgcaggagattccttctaaattagctaactgaataccactaacaacaacaacgagatgcctaaaacaacacagatgtgagcaca

SEQ ID NO: 880 - DNA, 99 bp, Glycine max
cgaagaagaagacgacgacatcgaagagccagaagacgaagacgaagaagaggaggaggaggacgacgacgacgacgacgtcgtttcgcaggagcaatc

SEQ ID NO: 881 - DNA, 105 bp, Glycine max
cgaagaagaggaggaggaggacgacgacgacgacgacgtcgtttcgcaggagcaatccccattgtcgcggctgcgcgagcagcgttcgaagctggaaaccctgtc

SEQ ID NO: 882 - DNA, 222 bp, Glycine max
gcaacacgaagacaaaggagtgggtgatcgaggcggagctcaagctcctcgaggaggccaccaacgtgcaggagctcattcgcgcctccgaaatcgccctcgccaggctccgcggcctcgagattttcgacaccgccgagctcacgctccaggccggtccgccggagctgcctcacaccgccaatgtcgtcgtcgacgtcgtcgagtccgccaacagaatct

SEQ ID NO: 883 - DNA, 106 bp, Glycine max
tccaaattgatgcagaccagaaattttaaatgaatttatcgttataactatatatttgtaattaattaattattgtggttactttaatttggaggatttgattgtg

SEQ ID NO: 884 - DNA, 107 bp, Glycine max
tgttgcaaatcacctgaatataatttatttatttattttactctttcaactatgtactgataataatataatttagagaaacaaccagttgtggttgtaaggttggc

SEQ ID NO: 885 - DNA, 112 bp, Glycine max
aatctccaccgagaccttggaggtctcgccgccgccgcctcccgacttcaacttccgccgcgaaatcgcgcgcctcgccgacctccgcgacaggctctccgcgtgctctact

SEQ ID NO: 886 - DNA, 214 bp, Glycine max
acctgatggcgctctattagatatcttacgaaatgctcatgatcttctttcacaatgtgatataagacttcctgaggtatatatgtattctaatgtgttttatgcatattgatttgttttcatgtggttgggttgggttcattttcatattatactagtttgcttattctaggtactttcaattattttatgttacgctttctctctcctgcag

SEQ ID NO: 887 - DNA, 95 bp, Glycine max
ctcttgtaacatgcgaggaagagagagagagattggcgccaaagtttgttagaaagaatggacatgtgtcagctgatgcagaaattaagggaggc

SEQ ID NO: 888 - DNA, 392 bp, Glycine max
tttacttctatttggcaataacataaaataatattactaactctttttgtaacataataaaaatttgtgtatcatttgatatttaatatttttttaaaatagtatatccttttttaacataaaaaagtaaaatatatattaattataaaataacaaaaattaataaattattcaatacttattattaattactacagtaaaaatataatataatatgtggatttgattctgttttttataacaacaaactgaatcatataaaaaaaatatacagttttttaaattttttgttttgacagtttttttgttttttgttttatatagtttgatgatttatgaataatttaattcgattttgaacactcttatacagggttggccattgtcatgac

SEQ ID NO: 889 - DNA, 230 bp, Glycine max
gggattcatgcattcaatagttcaaaattattaattaaatgtagtttttttgaataataataatttcaagataataataaatagaattcaaatttaatagtaaaaaataatatattattttatattttaaatattatgagggaaaaacatataaaaaaattcttctgtatacaaatatattcttctaaatatatatttactcaaatgttagttgttacatttccttattt

SEQ ID NO: 890 - DNA, 103 bp, Glycine max
ccgcaatttgttatagtgggaaaaaataataaaataaaataaaacgaactaggcagttgaattaaacaagtggactctttccaatgtagagttggaggctgca

SEQ ID NO: 891 - DNA, 267 bp, Glycine max
tataatgcccacgatccaagtgtattaatatttaataatgatatgatatgtcacttcttacacacacttcatacaaacaaaatcctcaccatttcttttttcattttgttttccttttacaccatatatctcacattttttaggaggggaaggataaggttatatcactttatttgtgtaagtaacttttttggattaataattgattattattattaaataagacaacccgaatataactttttcatttttgagggagcatgaaag

SEQ ID NO: 892 - DNA, 87 bp, Glycine max
caattgcaaaggatcgtcttgcgcgttgtcacgctgctgctgctgctgctactactactatcccttctcctgatatcttgcatgcca

SEQ ID NO: 893 - DNA, 77 bp, Glycine max
ggttgttgctgctttctcttgcctgcctgcctataactttgcaaagtgaccataaattttagctccgaagttcatgc

SEQ ID NO: 894 - DNA, 160 bp, Glycine max
tcaaggaatctaagccacacattctttaacatttattattattattattaagtgaaatttatgtttaagtgttactaaatgatgtgactgtaaatgttccactctatttagtaggtctcacagtttcacctaatgataaagagtgccaacattactgcaa

SEQ ID NO: 895 - DNA, 88 bp, Glycine max
atctgccaatgctctcaattattttaaatttcattcaagaagaagaagaagaaatacttcacatttactggaagtgtttcggcagaaa

SEQ ID NO: 896 - DNA, 396 bp, Glycine max
tggctcattagcatgacgttaggtcaattatattataaaataattaatgtcaatatatataacattaaaaattttaatgtatatttaatgcacatgtaaatttacataacaaattttgtaaaaattaattttgatctattaattaatttgtttacatatataaatttttatgaaacctatgatttttatttaaactttatatatgtaaacaaattaattattagatctaaattaatagtcacaaaatttattatgtaaatttttatatatatatatatatatatatatatatatatatattaaatatacattagaaattttagttttatatataatgacattaattattttataatataattgatttattagcttaattggttagagcgttgtgtt

SEQ ID NO: 897 - DNA, 180 bp, Glycine max
tagccaagcctaccttgacattctcataaaaactaaccaaaagaagaagaaaaagaaatagtccttgaaatttttcttttcttattgaccaaaaagaaaacaacgaaaataataataataattattattattaggaaataaaagaggaaaatcatacttaccttgtcctcgtccaactca

SEQ ID NO: 898 - DNA, 263 bp, Glycine max
gagtaattcgatatgcttgagattatatatatatatataacatcagtgtttaaaatgtgcatccaaaaaataaataaataatgtcttattgagatagaaaagaacaaaaatttgactttagatggtatattttaatttataacataagagtaaatatatttttattaatttatcatacttatatttttcataaattcaaatatttaaattattattttaaatgtttttaattagctaattgatattttcagtccgggagatta

SEQ ID NO: 899 - DNA, 263 bp, Glycine max; identical to SEQ ID NO: 898

SEQ ID NO: 900 - DNA, 97 bp, Glycine max
aaagtccgggtgattagagttaaagaatatatgtaaagatatcttaataaaaacaaaacaaaaaacaaaaaagttagatcaggcaatcagattcaga

SEQ ID NO: 901 - DNA, 148 bp, Glycine max
tgaaatccaagtgaaagattgttaaaaattttataatttctaattaattaattaatgtgacttacatattatattataacatatagtttacattaattaattaagaattacaaaattcataacattaatgtctcaatccatggacgtt

SEQ ID NO: 902 - DNA, 148 bp, Glycine max; identical to SEQ ID NO: 901

SEQ ID NO: 903 - DNA, 255 bp, Glycine max
tctactgctcccaatccaacactttactcttcttcctttttttcttttctcctcttctttttattctttgaaaactactaaattcaaagcaaatcttaattagaaagcaaaaaagaaagacataggttaatgatatttttgctctctcaattttcacactaaactttttagttccataatcaatatctaaaaacacgattaagaagaagaaaaataaataaatagcaagcaaacaaacaattattatccacgcgc

SEQ ID NO: 904 - DNA, 307 bp, Glycine max
cctctgagtagggcatcatccaattgaatcaataaaaaaagcaaatgctttaattacgctgaaaaagtatccttttctttttttttgaaattattcaatgaattaaatatcacagtgaaatttaaattaaattaaattgataacatatgtatttattttctaatttaaaaaaaactgtcaaaaaaaattcttttttatataaggatgatgttaatttaatttatttttgagttgttaatcttaacaatacgagtagctataatagacagcgatatcgagttgttaatacgagtagcaagcaatacca

SEQ ID NO: 905 - DNA, 163 bp, Glycine max
cacccatataaacttgtccaataacacttgatgtgtactaaatttttactaggtgttttaagtcttagtatggttaggttaggttaggcttgcaggacaaaacttctatttcatcatgtattgatttcatgatttctagacgattgatgttgatggaagcgaa

SEQ ID NO: 906 - DNA, 174 bp, Glycine max
gcaaataagggtgctcaaatataaaaaaattagaaagaaaaaattaaacatttccacattttttattcaaaaataatatatatatatatatatatatatatatatatcaagcatctcttttctctccgtttttccatctctagttatcagttagtagcacctaaatgtccatga

SEQ ID NO: 907 - DNA, 106 bp, Glycine max
tttgccttaattggttgcacaaaactaatatttcatgattttatcttcctaatggggaatctatatatatatatatatatattgaaaataaagcaaataattgccc

SEQ ID NO: 908 - DNA, 168 bp, Glycine max
cgttctcccttcatccttttccaaccattaagtcaaccttatatcttcctggataatactactatgtatgtatgtcactcatgaaaactgaaaaagagactcgtgcaataaaaattggtttaccttatcagacttgggaataagttttctaagagttgcaagctgtgc

SEQ ID NO: 909 - DNA, 119 bp, Glycine max
ggccatgaatgaaactcaccaaactgaagagaggcagagtcagtgacatgatgagggagtatttgtataggcactgcaaaggaagaagaagaatgatcactgcattgagcccagctgct

SEQ ID NO: 910 - DNA, 140 bp, Glycine max
tcggctaggtttcctacatagtatatgattgaattacaatataaatttttatatcgtgaatatattttaattaaattcatgaatattaacatttataataataataatgattattcgttatcatttcattagaataatca

SEQ ID NO: 911 - DNA, 289 bp, Glycine max
tgagtgacccagtgtgtgtgtatatatatatatatatatatatatatatatatatatataatatctaacataatataatcaatttttatttttatacttcaaaattaaatttattgttatgatcaaattataatgtgatcatttattattataaattattttgtcagtattataattaaataactaaagaaaatcttattttttaaaattaaatacaaaagttattagataatgataaataagtgtggtaaaaatatataaaacacagaaatattacatcatatcatgg

SEQ ID NO: 912 - DNA, 243 bp, Glycine max
tggatccaaccgactagatcagtctaatttcaataactatggtcttgtgtattagaatcgaattcaaaatattttagttatggaacaaaactatatatatatatatgtgtgtgtgtgattatattacttttttaactaaatttaaattatagagatgatttataattatacatacaagttatgttatatgaagaaaaaataaaaatttagggggacaattgccccttcattcacaaagtgtca

SEQ ID NO: 913 - DNA, 243 bp, Glycine max; identical to SEQ ID NO: 912

SEQ ID NO: 914 - DNA, 96 bp, Glycine max
caagaagttcaccaaacgaatattttttattctacagaaaaaaattactattactaatactattattattatttgactccattaaagacccgagtc

SEQ ID NO: 915 - DNA, 106 bp, Glycine max
atagcgcgtgactactcgtttttttttttatttatttatcaaaaagaaaaattacaaattacactcgttttatctaaaaataaaatttcactcgatttctttattt

SEQ ID NO: 916 - DNA, 125 bp, Glycine max
agcagcaacacgtctcatctcaagaagctcatgcttttcaatctgcattccagataataataataatctatcggtttcctataattaactgaaaaatagtcaacatgaagaatgaatgcagccaa

SEQ ID NO: 917 - DNA, 135 bp, Glycine max
tcgcggaatactcaattcgggagagagagagaaaaaaaacagaatctagtaaagcatgatagttattattctactgctacttatcacaagatagcaggttttgttgtagttaagtagcgaagtggagttgcaaat

SEQ ID NO: 918 - DNA, 114 bp, Glycine max
aagtgcatcatttaacttctcatatattatatataaaaagaggggtaaaaggaaatttatcttatcttattgatcataatttctcatatattaaatcaaacgctacgtacagga

SEQ ID NO: 919 - DNA, 73 bp, Glycine max
tttcaaacaaagcaatccactatatatatattccgtcgtttgaatagagcatgaaccagaggaaacagggagt

SEQ ID NO: 920 - DNA, 132 bp, Glycine max
ccagaggaaacagggagtcatttcagataacataatgcagttcatatttaccaatatatatatatatatatatatatatatatatatatatatatatatatatatatatatataccacaaacgacggaggat

SEQ ID NO: 921 - DNA, 78 bp, Glycine max
ccttatcccacgacacaacatatatatatacttccttaattaccgggtgattggtacaatattccaaagccagagctt

SEQ ID NO: 922 - DNA, 79 bp, Glycine max
ggaaacaagcactctctcctttttcttttcttttcatcattggatcaactttatatttttgtgctagtgctctagtgtc

SEQ ID NO: 923 - DNA, 129 bp, Glycine max
atctgtccagccaccaaaataatgttccaggtgtcaaaaactatgctctaacctttttattttattttttattttgcattttgaaaaaacagactctgttttgctttttcgaagcacgggcataccaat

SEQ ID NO: 924 - DNA, 176 bp, Glycine max
tttacactgccggatcacgttcctctgtatttatttattttttcttttaaaaccatcgaattttttttagaattttttaattatgttgtgaattggtaatatttggttattaaaatattttaaattatgaaaatcaatattgtattattttgatttatgttgatgatttccaatgg

SEQ ID NO: 925 - DNA, 87 bp, Glycine max
tggtaaagacatgaaatcaaatcatgccaataaataaataaggtaactagaaataatttatcccctgatcgtgttcatcctaaccga

SEQ ID NO: 926 - DNA, 124 bp, Glycine max
cctctttcaattcgcacacacccaacccaacccaaccctttaaatcaaaaccaaaaacttgtttccatttcatacttcattatatatgtatatatacatacatatacacgaattgaagctagcc

SEQ ID NO: 927 - DNA, 107 bp, Glycine max
ttgcttgcattctatgtccatttcaaatagtaagtcactatatatgacgtgtttggtttcacgtctttacagcgtgcgtgcgtgtttagtttcacgtcttggatgtg

SEQ ID NO: 928 - DNA, 104 bp, Glycine max
tttgcctacactaccacttttaatgatgtcatgttttgttttgttctcatattcacatagcgataacgtgcatcctcaatagcattcgtgttggatcgtcaatt

SEQ ID NO: 929 - DNA, 244 bp, Glycine max
aattccttatcaattcatcacatatttcttttcacctatttatctatttcctatttatttattttcattattcctaaactaaataactttgtttctattctacttcttatatatttctattcaccttttttaatttctagttatcatatcttgtacttcttttaatttttcttccaaccaaacatatttagaaactactcttgggataatcagcagtagtgttttgaatggaaaccctttctgg

SEQ ID NO: 930 - DNA, 162 bp, Glycine max
ccctaataatggtggaagcagttattatgtgatgtggttaacctttcattattattatatatatatatatatatatatatatatatatatatatatatatatatatacctttcattttctttaaaataatgtcgtagaacaccatattgggtttgggttcct

SEQ ID NO: 931 - DNA, 199 bp, Glycine max
aaattacaagctgccaaaattttcaaacttaattgttaatactaaccataacttatagacagaaattacaaatatatatatatatatatatatatatatatatatatatatatatatatatatatataattacaaacatattaaaataatatagtatatatcattatcattttcatttttgagaagtacaccctacggt

SEQ ID NO: 932 - DNA, 155 bp, Glycine max
tcggatgttaaatgattggttcgtttttcagtatcaattgacttgatgtttatttatgttattatttatttatttgttgttaattattgactaattttcatgataatagcaaaatgtccgtacataatttagagaaatttccagaaccagtccaa

SEQ ID NO: 933 - DNA, 142 bp, Glycine max
gccggaaattctctcctccgccgccgccgtcctcgtcaccaccgccgaaaaagaaggggaaccttcgcggcggctcggataagttgcagaggaaaatcggcgggccgcgggggcggagagggcggaggatggcgagcttaat

SEQ ID NO: 934 - DNA, 187 bp, Glycine max
tcccaatatcctaggtagagccatataatatcaacagtaaattacttcctatattttcaacacacttacatttttagcaactataaataaataaaattatctaattatgttagaataatctcttattatagtcaatttgtgttctcaatgatgacaagtgaatgtgatcaaaccgttcagttgggtt

SEQ ID NO: 935 - DNA, 244 bp, Glycine max
agaatttgaacatgaaactcccaattaaattaaattaatttttcgtcaattatgttttataaattaaaagtaaaaatagaaaaaattgtaataatacttactacaaaatgagttatgctaaaaaaacgatgttaacaattattaaataatactaattttctgaaaatcaagattaacaaagtagatttattaacaaaaatgttatcacacatttattaacatcagttgtcatgttaattgggca

SEQ ID NO: 936 - DNA, 91 bp, Glycine max
accttgtgtgttcgctttgccaacgttttcaattacttttcttttcttttccttttttttaaatcactccaaataccaaacaccctctcca

SEQ ID NO: 937 - DNA, 437 bp, Glycine max
cccatacccgttcgttatatatatttttatattattaataacataattatatatttatatataattctattatatatattatgtgtaattgttaattatatagttatgtaatttcgtattttagttttttataattattaaaaatacaaaataattattttaatagctaaataaataattttataattgtaatactaattataaaaaaattaaaaataatgcatgtaactaaaaatataatttaactcttaaatatgtttatattatttattctttattaaattatatatatatatattgattgaattaaaatataattaataatttaatctataatttatttaaagtatatgaataaatattattatttaaaaatgtgagatgaattttttgagggttttctcgaatccaatagaattcgatgaagatgagattga

SEQ ID NO: 938 - DNA, 115 bp, Glycine max
tgcaactgaaccaaatgattaaactaaaaaaacaagctagaaaagaaaagtaaagaaaaaaagagattgttttactagtcccctcctatgtagttgaaaccagtctgctgttcca

SEQ ID NO: 939 - DNA, 95 bp, Glycine max; identical to SEQ ID NO: 390

SEQ ID NO: 940 - DNA, 170 bp, Glycine max
tttgttgggagacactgcacaaaagaggctattttggaaaggggtattattgagacaaaaaatataaaaggggacaaattcaacagttaagggaggtatatttatcaataaccaaaaagaatactttgaatgacatacccacacacacacaaaaagtctagtgggtcgcc

SEQ ID NO: 941 - DNA, 119 bp, Glycine max
gttccctcatccctgttttcttggcactgaatgatatatatatatcagcacatttaattactttaattagattaattaacattagttatggctatgggttatttcctttgcgaaattca

SEQ ID NO: 942 - DNA, 127 bp, Glycine max
gccaaacactcaagcaaatattaatttaacagttgatatatatatatatatatattggagataactatcatccttttaaattaacttttagagttgagttaatttttaacccaaattcttagtgtca

SEQ ID NO: 943 - DNA, 217 bp, Glycine max
ccgagggttaatctcacaactctacttaagattcctattaaatgaccaaaaaacaactcttgctcaaattgaaatctaaacttaagcataaaatttaaacgtcttaattttcaaacatatatatatatatatatatatatatatatatatgttttattcttcttacaagttcttttaggtaaatatgttccaaattattatcgtgcgtacacactcc

SEQ ID NO: 944 - DNA, 199 bp, Glycine max
caaagttcatgcatgcttatcttatactctccatctcaaaagtgttgtattatattatattttacacatattaaaaaaataaaaaaattaaagaaaataataattttacaaaactaatattattattagaaaaaatattatatactgataataatataaaaaaattacacattaacttaatcacttctcatcgtgagtg

SEQ ID NO: 945 - DNA, 150 bp, Glycine max
ctgcatgtgacaaagcaattactttttttaaatcaaaataatatataggaaaatttcacaaaaacacacaaaaaaacaattgtaagttgaaatcccgaaacatattaaccaatacaataaataaataatttacactgagtacttcccgga

SEQ ID NO: 946 - DNA, 195 bp, Glycine max
accttcagcatgccttattttgagttaaagtttgtattaaaataaataaataaactaaaatactacctttcttttaattaccaagaatgataaaagtccgtatgaagaatatatatatatatatatatatatatatatatatatatatatatatatatatcacaacaatatcacttaatgtttaaggcgaaggtt

SEQ ID NO: 947 - DNA, 195 bp, Glycine max; identical to SEQ ID NO: 946

SEQ ID NO: 948 - DNA, 124 bp, Glycine max
aaatcaaggagaaatgcaaaagagaattataaggttagttgctatcatttgcattcttcataatatgtcctcccttttacaatttcaaagatgtaatgtaatgtttgaaagttgttgcattggg

SEQ ID NO: 949 - DNA, 97 bp, Glycine max
acgagctaagacgttaatggttcaattctagaccttgactttttattggattggattgcaattcattggttactgataaatgaaccgtgaccaattt

SEQ ID NO: 950 - DNA, 97 bp, Glycine max
gcaaactgaagcagaggaaagttttgtttagtttggagagagagacagagagagaatatgagtcagcagataataaatccaaagtggaattgtttca

SEQ ID NO: 951 - DNA, 228 bp, Glycine max
caattccattccatcaatttaattctagatagtattgaacaataaattgaattctttactattaagttatcattaaattaattcattcaacttttaaatttggtagctattacagtattaatttaattcttaaatttgataataataataataatctaatttattctctgattataaattaaaataattgatagctaataaaaattatcgatggttaacttgagttgt

SEQ ID NO: 952 - DNA, 117 bp, Glycine max
tgagaatgcaatttggtgtactatatattaaaaaaaacaataaataatctctgtttatttctttcttttcttttctttaccaatcctttcctttttatttctcatctcctctagggt

SEQ ID NO: 953 - DNA, 122 bp, Glycine max
gccttcatttgttgcataaacattatatgcaactcttatttaatttaatttatatatatagttcatatcgttttatttgtctcaatttactcaataatagtgtaaggtaacaggaagggctc

SEQ ID NO: 954 - DNA, 206 bp, Glycine max
atgcacacccaatccaaccccaactctcctctctctctctctctttaccttctttggaaaatttatactagtctatactagtatatgaaatagtttaatgactgaaatgataaaaaaaaatgtgtaaaatataagattaagatgcttatcattatcaaattagaatgtgaaacaaaaattgaaactatacagtgcgtgattggatt

SEQ ID NO: 955 - DNA, 216 bp, Glycine max
tggccttgcaagattaaagaaagcaatttacagttaaattttatatgttcataatacacttttattttattttttattatttttattacctttttccatggtatataaatcttaagaaagtgaaaaaattcaaaaattaaaataaaaaaatctcaaagttaactcacttctaacacttcaaaatatttttgccaaaacaatccttgtcgattaaca

SEQ ID NO: 956 - DNA, 95 bp, Glycine max
gacacgggactccttcttagtccttgcatagttgcattgtatctacgtctagatatattattattatggataagcttcaatctttgtgtgccgct

SEQ ID NO: 957 - DNA, 110 bp, Glycine max
agcttcaatctttgtgtgccgctccaccattcctccccctttcccatctaatattttattattattattacctcctttccttaattcatgtacatgccatcctaagagaa

SEQ ID NO: 958 - DNA, 110 bp, Glycine max
ccaattctccaccctctcattgaaaaaaaaacaaccaaacaaaaaaaatcaatcattttattttatttttctacgaaaatggttgatttacattggaaatcaaagatgcc

SEQ ID NO: 959 - DNA, 98 bp, Glycine max
tggaaatcaaagatgcctagttccaaaacaccaaaactctctctctccgacaacaagtccttaccctctttgcaactacccttccgcaccacagatat

SEQ ID NO: 960 - DNA, 111 bp, Glycine max
cttccatttcaatttcttgggtaaaataaaataaataaatgagaagaaaatataaagtcttaaactaaaatataacagtaaaataattctaaaacatgaatcaacaatgca

SEQ ID NO: 961 - DNA, 203 bp, Glycine max
aaggtaaacaacccagacaattgtgtactttgacaaaagaatatatatatatatatatatatatatatatatatatatataaacaatgtagattagtgacctataactatagtagaaagtatcatgttttttttctccaacacatccccataatagaggccagaagatgaacgaagtctccaaactgagtggcccaacagtac

SEQ ID NO: 962 - DNA, 170 bp, Glycine max; identical to SEQ ID NO: 940

SEQ ID NO: 963 - DNA, 108 bp, Glycine max
tggtacagtagttcatcagcaattcacacaacacaacacaggcaaataatcttcaaccattcttctttttctttcttctttatctcaattgtttgtggttactgtgca

SEQ ID NO: 964 - DNA, 138 bp, Glycine max
actcctcctctcgttcgccgccatcttcttcaccgtcctcctcctcctcctcttcctccgccgccggcagctccgcctcccgccggggagctacggcttgccgttgatcggcgagacgctgcaactgatatcggcgta

SEQ ID NO: 965 - DNA, 118 bp, Glycine max
tggtacagtagttcatcacctttttctctttctctctctctctcttcaattcaattcttttctgaattttcacttctttcttttattatctcaactgagttttcggctctttattgga

SEQ ID NO: 966 - DNA, 134 bp, Glycine max
atggcatccgtctttacactcacgtttgaagaaagaaagaaactctattcgttatatacttgcacgtctaacaactttcatttttatctttatatggtatttatatactccttgcggctacgcgcactttactt

SEQ ID NO: 967 - DNA, 179 bp, Glycine max
tcgcacggatagtgattttaatcgatattctcatatatgttgatatttatatactcatattgatacctatgatccacactttatttatgtataagattaataataataaattaataaaaaaactgactaaaacaattattacaattataataaattttcattctcaaataactcaagca

SEQ ID NO: 968 - DNA, 111 bp, Glycine max
caaattcaccgccaattaaatttggattccatttccaccaaaacctaaaagcagagagagagagagagagaaggcccttagagggagaagcggcgaggacggaagagggat

SEQ ID NO: 969 - DNA, 97 bp, Glycine max
gaaacccagtgagcaagaaacagttactgtgctgtgctgtgctgtgctgtatatcagtattaaattatgggaaaggaaaaaggttggtttagttggg

SEQ ID NO: 970 - DNA, 103 bp, Glycine max
ggtgcattgcataggaagctggagatggttacggacacctatgtgctgctagatacttcaagagaagaagagagagagagaaatgaagagtgtcaatttggtg

SEQ ID NO: 971 - DNA, 105 bp, Glycine max
cgtcaagcattgctatctgagtatcatgatttcaaagaaaaagaagaagaagttagagcaagacaatttcaacctagtactgataatgtttgctcttgttgtggc

SEQ ID NO: 972 - DNA, 178 bp, Glycine max
cacgcctctatccctctatcttttcttttctaattttcttcaactttttcttgttgcttttatttggcttttgatattttatatatatatatatatatatatatatatatatatatatatatatatatatatatatatatatatatataaagaatcgtatacccaattacgacgaacc

SEQ ID NO: 973 - DNA, 95 bp, Glycine max; identical to SEQ ID NO: 390

SEQ ID NO: 974 - DNA, 296 bp, Glycine max
tgatacatagagatattcgagacttaaaatattaatcattacaatataagtatttttcacaaaaaaatattttttatttatatatatatatatatatatatatatatatatatatatatatactatgtgcaacgtatattaattatattaatataaatttaaatatatttttaatcctttaaatttggataattatttttttagttcttaaaaaataatgtttttattagaccttctatgaaaagttacttttaatttctctttattgccaaaatacttgacctgcatgatttggt

SEQ ID NO: 975 - DNA, 169 bp, Glycine max
gaccgtgtctctgcattcatttttataatgaaataaagtataaaatttaaataaaaatactcaaattttcttatatatatatatatatatatatggatcaaaaaattagtttcaccatgtataaaaaacaaattctaataaaattattagaatgtgtttggatgaagaa

SEQ ID NO: 976 - DNA, 282 bp, Glycine max
catgatttggtggctctttttttttttacttgtttggttattttttaagaagaataataaaagcatagatgtagaattattataactttttatatatttttgttgttttaaattgttataaatcattattaaaaaaataaattaaaaaaacattttttataataacaaattgtcaactcttttttttgaaggactaaaaaataattattcatattttaaaaactaaaaatatatttaaacctaatatatatataaatatgatatgtgcagacggactaggaa

SEQ ID NO: 977 - DNA, 109 bp, Glycine max
tcaggttgaactgcgaacatatacactatcactaaaaaggaaagcaaatgttaaggttcattgcacagtagtttaatgaaatgaaatgctatgtaacggaagcaggttt

SEQ ID NO: 978 - DNA, 110 bp, Glycine max
tcttctatgattaacgggttgataaattattattagtagtagtagttttgttgtttttatcgtgattctttgtaatttttaaaaagttcaacaatgttctgcacttctgc

SEQ ID NO: 979 - DNA, 105 bp, Glycine max
ttgagtgacacaaagcataatagtaactattagatacaatacaataccttcaagtactccttaaccttgtctgcttctgggaatgaatattctgttgccactgca

SEQ ID NO: 980 - DNA, 111 bp, Glycine max; identical to SEQ ID NO: 960

SEQ ID NO: 981 - DNA, 106 bp, Glycine max
accgatgccaagtgtaacgctagagactcacacgtccctgtatgtgcatgcaaaaaattaaattgaataagttcgggtatatatatattattcatggaaccggaga

SEQ ID NO: 982 - DNA, 107 bp, Glycine max
tgtctaaccagcactggaaagttttaaagctttctctctctctctgtccctgtttgagtgtatttttgttatattttattcaatcaattggttgattggagaaagtt

SEQ ID NO: 983 - DNA, 130 bp, Glycine max
ccaaatccatgaggagaaggaaaaaaaaaaaacaagaaagaaagaaatattagtgctaccaacaataatctagaaaaaaagggaaacaataatagctattcaaaaataggaagaattactttccagccca

SEQ ID NO: 984 - DNA, 177 bp, Glycine max
gcatgatttcttccatcttcaagttgtctaatttgcatctaaaatttttgtatctcggtagaaaataaataaataaatgttaatactaaaggataaatagtatttttattattttttcttacctactaaattttttttaattcaaatatttttacttctcttcaaccaaatcacttt

SEQ ID NO: 985 - DNA, 184 bp, Glycine max
aagtttaatgataagacatcttgaaaattaaattatatatttcagaaattaaaaaattcacttattagttataaaaactagaagagatcaatataaaaattatacgaataagtaattagaccataaataaataaataaggtctagtgctagcttaggcttattaggtaccttgagctgtgccaa

SEQ ID NO: 986 - DNA, 134 bp, Glycine max
tgaaaggatttggtgcatttaaaatcttcaagtgatacctttatttcagataatggaaaggtataatcaatcatagagctagctagtaaataaataaattgatatacattacaatatgctactcctttgctcga

SEQ ID NO: 987 - DNA, 154 bp, Glycine max
aaacgcaatttcatgtgacatttctattataaaaaaatatgtgacatttctcatttaaaaaatactaaacaatagtattttttataattaattaatttaggcaataaatatcaagcttaataaaaatattcaagttggagacaggcagaggaat

SEQ ID NO: 988 - DNA, 178 bp, Glycine max
ctgaaatattgaaacgctcaaatttaaattagcactatattaatcttctctctcattcgatgatgataataataataaaaaataaataaataaaaacctatctcattgattttttataaaagaaaacatgggataaaataacacttctctagaatgaacagagggaataacttgcttg

SEQ ID NO: 989 - DNA, 178 bp, Glycine max; identical to SEQ ID NO: 988

SEQ ID NO: 990 - DNA, 100 bp, Glycine max
gggtatcacagccattgatgctatctaagtcttctacttttagagaaaaataaataaatatgaaaagggacaaaatcgagggccaagatggagttagggc

SEQ ID NO: 991 - DNA, 173 bp, Glycine max
catgtaagtttattctagtggtcagtaataataataatgataatataaaacagttttacattataattaatcgaaataaccgttgatataattttttatgtggtcatggtaaaaatcaaccacctctaattgttttgatcctttaactctaattttcaggtagagctggtgga

SEQ ID NO: 992 - DNA, 121 bp, Glycine max
cggactttaaggactaaggagttattgtgacttatgagtaaaagtaatgttctattttaaaaaataaaataaaattgaagaatctgtaaaaaattatgtatttttttatggccaagccacc

SEQ ID NO: 993 - DNA, 260 bp, Glycine max
agggtttgaggcacatttttcaatagaaaatgttgaaattagaaagtgtcaatttttttaaaacttttttataagtttagatattttttaagcagctttataggcatgatatgatatgagagacaattgacttttaacatattattttacaaaaggaaaacctttttaactttattctattgtcttttggggtttggggaaggtgggtgaaaatttgaagtgcatcaatatattaccttaagatggtgcttctcctttcc

SEQ ID NO: 994 - DNA, 170 bp, Glycine max
ggcgacccactagactttttgtgtgtgtgtgggtatgtcattcaaagtattctttttggttattgataaatatacctcccttaactgttgaatttgtccccttttatattttttgtctcaataatacccctttccaaaatagcctcttttgtgcagtgtctcccaacaaa

SEQ ID NO: 995 - DNA, 186 bp, Glycine max
gggaaggtgggtgaaaatttgaagtgcatcaatatattaccttaagatggtgcttctcctttcctttccttcatttatgtgtgtggttgttttcaagaaggttgagtacattgtaattgtatttttctagtacaagcaaatcactttatttgatatttgtaacccataaacaattcaacgtgcaca

SEQ ID NO: 996 - DNA, 135 bp, Glycine max
ccttgattcaaaggagagcaagaaaaaaaaagaatgatagggaaagagacatttcttatttgctttgatttgattgaagagaaaaaaagaagaagaagaaaaataattttaaaaaaaaagccatctcatttggtt

SEQ ID NO: 997 - DNA, 95 bp, Glycine max
gggaaggaccatttagccttttgagtagtagtagtagacaggaatgatcgtaccaaaaactaaaaattaaaggataaagtacagagcacgttgcg

SEQ ID NO: 998 - DNA, 117 bp, Glycine max
ccaaggttagagtgcatcatctcatgaagagagtaaatattcatattctagagagagagattttagttaacatacgtgatcatcccagccaaggtctttgttgaagatgatggcagc

SEQ ID NO: 999 - DNA, 116 bp, Glycine max
gagcaatccaacctttcaagtataataattattattattatggccaaaattgccatgtacgtatatatgactttcggggtgagtatttcaagtggaaaaatggagtgtgcctgcta

SEQ ID NO: 1000 - DNA, 304 bp, Glycine max
ccgtgcgtggttagtagtagtttattttcccccaattttctaaactttcgtttgaaagagattttttttttttttttggtttggtttttgtgtaactgcacagattagtagtattttagtttagtttatatacttcagtaaaaattgtctattggataatttatttaatattaaattagatgacggggtaataaaatttgttatttattggatacttcaaagttcaaaggtactacactactactactgtgtaataatttttgactgtgtttgtgatgaactacttgcagtcgaactcgaaaca

SEQ ID NO: 1001 - DNA, 95 bp, Glycine max
ggatacttcaaagttcaaaggtactacactactactactgtgtaataatttttgactgtgtttgtgatgaactacttgcagtcgaactcgaaaca

SEQ ID NO: 1002 - DNA, 114 bp, Glycine max
tcctcaaattgtcctccactagatggatttgatagggttaacagaaaatatatatatacataggaataggataatgctcaattatgaaaaaatcaatatgttgggtagccatgc

SEQ ID NO: 1003 - DNA, 103 bp, Glycine max
tgccgatattggaatttgtatatcctacggaaggcattaggtgctagctagctagataagtattttaattaaaaatattgcttaatagagcaaccagctctgt

SEQ ID NO: 1004 - DNA, 177 bp, Glycine max
tcaaggagtctagttgctcaattggttaaataatgtataagttattataaatttttaataataccactttattattatttttattattattgaaaaaaggggagtgagagaggttcataggtatcaattggatagcttgaagctagcatggtagtttgttggtgaaggaattccatg

SEQ ID NO: 1005 - DNA, 144 bp, Glycine max
ttgacaacatacataccgaagtacatttaattgtaaagagtaagaaatatatatatatatatatatatatatatatatatatatatatatatatatatatatatgagaatagaaatatcttatatgttgattagcatttgcaaa

SEQ ID NO: 1006 - DNA, 369 bp, Glycine max
atctgttgcgaaagatcgtagattttatttataaaactagatatgttaatctcagttaatgatggatcacatcacttatttattcactttcttgtatatttattaatttagataaaattaggataagttacttctttgttttaaaatatatatatatatatatatatatatatatatatatatatatatataattttttgtttttttaattatttttcttacttaaaaggcattagttaaattttaattttatttaattttataatgttgaatgaaataaaattaatagaattagaagttagtataaaaatatttaatgttattaataatatttaatgactgttttaaatctcgctcgtataaagcttt

SEQ ID NO: 1007 - DNA, 130 bp, Glycine max
caagaccaaagaatacatagcaaaaaacaaaataacacactctatcatattttttaacacattcaaattctctgatttttgataaattttaattaataataataattgtcttacgtgcaagagaatgtgt

SEQ ID NO: 1008 - DNA, 96 bp, Glycine max
ccgacacgattgttaggtccagatccacggatttcgacggagggggacgcgatgacgtcatctttctcttctcttctgtgtgcttgcaactttcag

SEQ ID NO: 1009 - DNA, 137 bp, Glycine max
tccgtagtgggtgacaagttaatagtagtaattgtttgcggagctagtagtagtaggaggagtttctatttaaaaatcttattttcttttttttatatatatatttttttataaatcgaatttagtgaattgtcttt

SEQ ID NO: 1010 - DNA, 108 bp, Glycine max
aattgtttgcggagctagtagtagtaggaggagtttctatttaaaaatcttattttcttttttttatatatatatttttttataaatcgaatttagtgaattgtcttt

SEQ ID NO: 1011 - DNA, 113 bp, Glycine max
acaaagagaggattacatcacatatttaaaacatatatatatatatatatgatcataacaaaatcaaaattaaggttagatttacaatcactattggttgaagctaggtcatg

SEQ ID NO: 1012 - DNA, 121 bp, Glycine max
aattaagtgaccgagatttgatataagtctaataacttacacatatggtgtaaataactcatactctctatatatataatattagcattttgtgtgtgtgtgaaggaaggctaaatgtccc

SEQ ID NO: 1013 - DNA, 100 bp, Glycine max
ttcctttcatatcaaacaactttacaaaaatatttgaattatacttttatttttatttatttattgtcttttcttctactttcgtgaatcaatggtaccc

SEQ ID NO: 1014 - DNA, 97 bp, Glycine max
tttgaagcagtgacgtgttacatcagtacatcacatcacatcacgtaaatataggtaataagctcggaaaaagttttgtcgtttcacacccatctgt

SEQ ID NO: 1015 - DNA, 128 bp, Glycine max
tctcctagttgcgataccaaaaaacaaaacaaaactccaagttcatgtttctctccagaggtcataatctcatatctagattgaatttaatttgatgaacttatttgaagtttttcgcccatccatgt

SEQ ID NO: 1016 - DNA, 204 bp, Glycine max
aagttgagttgcttgtgtcatataatcatgattcaatatcctatatcagtaaaaagtttttattttgtcatttaattacaaattcacaattaacatatatgagaagtttgttaactttcataataattatcttaaaaattatacttactgtgatttttgattgattgatagtgtaaatttttttacaccagaggtgcattgaaa

SEQ ID NO: 1017 - DNA, 186 bp, Glycine max
tcctagcgacttacaaatatcattatatctaatattgatgaaaaaaagttttaatataaaattttaaaaatctggtatcataaaatgaggaagactttatgtaaaaataataataataatatgaggaagactttattgttgaatttgtaactttagaatgttatttcgtctttctcgtttcccatg

SEQ ID NO: 1018 - DNA, 135 bp, Glycine max
ttgccctacatttggctaatatacattaattaaaatcagaaatacttcctttagtttcaaatgtaatcaacaaaaatttccctttatatatatatatatatatatgaaaatctcaactaagaccctatttaatga

SEQ ID NO: 1019 - DNA, 93 bp, Glycine max
tggtagggagatgctacttgctagcccccactgtttttagttagttagtgactttgtgcatatataactctgttcttctgcatacgtgtggtg

SEQ ID NO: 1020 - DNA, 178 bp, Glycine max
ggttcgttgctcagaagtttaatttagttgttaatccttttttaaaaaaattcccgtaaaacaaatcaaagagtatgaacttattgacatttccggcaaaagaagggataaaaaaaagaatatgaatttattgagatttagagtgagtgagtgtgttttgtttcaattcatccttaaa

SEQ ID NO: 1021 - DNA, 188 bp, Glycine max
aaattactaaatgattgggatttaaaataaataaataaatggttgatatttttttagtagtttatccccgatttaatctcagagactatttacaaaaggagtaagttttacaaattatttgaaataaaataaattaagatttttatgtgcaaaaagagataaaatttaaagatcaattaaacaaggca

SEQ ID NO: 1022 - DNA, 197 bp, Glycine max
acattctgatggaaggattatatcttttatgaatatatatatatatatatatatatatatatatatatatatatatatatatatatatatatatatataatttcatgaaatgatacttttcattaatgtgaaaatctctcacatttatgactaatttttaaatgtacgataaattttcatattacagcacatcacaa

SEQ ID NO: 1023 - DNA, 113 bp, Glycine max
gtgcatcaccattaaactcattaattaaatataaaaacttaacatgacttaaaattaaaaaatatatttctatttaattgtaattaattaattgtgtggttgtttatgtgttt

SEQ ID NO: 1024 - DNA, 176 bp, Glycine max
caagccaacgtcatcttctttatgatacttccatccaaattaaattaaatttaaaccaataaattgttttttagaaggacataagagtagtcatatattagataccagagttgttacaatgtaacttatttatgagtctttataacgagctcaatagtgtagtccgaagctttgaa

SEQ ID NO: 1025 - DNA, 259 bp, Glycine max
tgcaagctgcagttagattagaaaaaacagtaagtatatggtacgtacttcatagcagccaaaagtgatgactatatacatgtttaattaatttagtttagtttagaaatgtaatcatttattagcttatttggataaattaagtttgtgaaaagtaaatgattattttttaacaatatatctacatggtagaagaatatgttgacatttattatgatagataagtacctccatggagtgggagaaatcatgggaggct

SEQ ID NO: 1026 - DNA, 129 bp, Glycine max
tgcgattcggattaattttaaacatgaaaactaaaaatcaaatcaaataaacaaatgtgattgcttttaattttttagtttttctaattaaaaatttattattgtggtgtttttgcatgcctcttgttt

SEQ ID NO: 1027 - DNA, 254 bp, Glycine max
cagctcgaactcttgtaatttttttcttcaaaactcaaatattttactataaataatataatattaaataaagcaatgaatgagatattttatgaaagtattgagagtaaaagtgagataaaataataataataataataataataataataataataataataataataataataataataataataataacttgtaagttcaaagtttaaacagtacttctaatagcatataaaagcattaagtcagcgaga

SEQ ID NO: 1028 - DNA, 86 bp, Glycine max
agcaatgcaagaaatgaaaatgggggaacagtttatttatttatatatgtattactttgatggctgcttgaagcaatttggaggaa

SEQ ID NO: 1029 - DNA, 99 bp, Glycine max
atgttcggctctcctacctgcattaattaattaacctctttgttcatttctatcaaatttttttcatgacttttcttagagatttcacgtcaacaatga

SEQ ID NO: 1030 - DNA, 265 bp, Glycine max
agggtctctttgaataagtttctctaaaagtacttttaggaaaaacaaataagaaaaaaaatatgaaatgagatttttcataagttaaaatgagttattagttaatcattaattaattaatagatgtcattttatcttttagaaaaattatatacaaaaacttctacaaatttaactaataaaaagtttattagagtaaaatttggtctattttaaaaaagaacacaagttagataatttgaggttaatgctgattggtcacagg

SEQ ID NO: 1031 - DNA, 170 bp, Glycine max
tgaaattcaatacatgagcatattttcagatttaatcagctaatcaactttcatttttcaataacttcaaattttcaaaatttgcctttttttaatctcatgttctgttctatttattttattttaaaaacatacttccacaggaaattttcattccatcaagctttcaa

SEQ ID NO: 1032 - DNA, 100 bp, Glycine max
tctgtttggattgatggaagggagtggagtggaggggaaagatgttccctcgtttggtttgcaaaaatgaagatgggagataatgagagaggatggcaca

SEQ ID NO: 1033 - DNA, 121 bp, Glycine max
tcaggcagccatgataataaaagaaaaacaaaataaagtcactttaaaataagggtaatacagaaaatgaaaagttataatttattccattccattctctttccaaacgatggaaccaaat

SEQ ID NO: 1034 - DNA, 123 bp, Glycine max
caaacgatggaaccaaatatttgtcttgttcttttataaattacctaaacaatggaatgatatttttaatccattccattccaatccgttccactccattattttccaatccgttctgctcta

SEQ ID NO: 1035 - DNA, 112 bp, Glycine max
gcgagatctgaatggaaataaaagaggagaagaaaaataagaagagagagagagagagagagagagaggacctcttgcttgcccttggtgaggggcttgtcgaggacgttac

SEQ ID NO: 1036 - DNA, 125 bp, Glycine max
acggtgaattggctacctgatcatttttcctatgctatattcaggattttaaaaattgacaaaaaccaagggttatttatttattattacattgaaatttctttttcatgtacccttaacaaatt

SEQ ID NO: 1037 - DNA, 100 bp, Glycine max
tgcagaggtggtattggtagtggtgatggtagtagtagtaatgtcgatgatggtgatggtgatagtgatgttggtgattggaaagacattggtgacggtg

SEQ ID NO: 1038 - DNA, 124 bp, Glycine max
aaattgtttatgacatggaaaaaaattaacaacaaatgttttattattattattgttgttattattatttatacataaatattttattactgtttatgtattaaaatcgaggaatcatttcacg

SEQ ID NO: 1039 - DNA, 255 bp, Glycine max
ttattcctttgcccaattttccccgataatttcatttgtttttatcgttattttcttctttttatttgcatgattttcttcattcatttgtattaatttatttccttttatttgaataattttctgtcacttttttacatctttttcccattcatctaatttttctcacttttatttatttatttttcacctatttgatgttttaataacaattttgtgcaaataaaatgtaggttgtttaattgtgattagtga

SEQ ID NO: 1040 - DNA, 132 bp, Glycine max
tcacagtcccgagtcctaacctgagttgtgtctcaacttgctcttcttcttcttctctttcaccctccaaattttctcactctctctttatcttcaccttttcagtttaaagcttcagatcacaaccgatcc

SEQ ID NO: 1041 - DNA, 191 bp, Glycine max
ccaccattcaccactttctcttcacaaggtatgctgaaaatgaaatacccactttgactatgtcaactttatactatttcatttctctgaaccaaacaaaacaaaacagattcattttttacgagtatgttttttttttttttcaagctttcaaaatttgacccttttttaaccgtttgctgaaactgctt

SEQ ID NO: 1042 - DNA, 229 bp, Glycine max
aatgatttcaatgttaatacgatatttttattttagatagaaataaaatattatattagtataagaaaatataaacaaaatcaaaatagagataaaaacaacttaaaaaattatgattaatttaatttaataaattatatgagctataaattaatgtattttacatttaataattaaattacatataataataaatttaattatatgatattagttgagttcaaacaaa

SEQ ID NO: 1043 - DNA, 194 bp, Glycine max
agatgatatgcaatttcagagttatttttttcccctcatttaattttaggatctatcacaaaattaaattggaaatagtgtaaaaacaccgtatttacttaatactatttattattattaagattatgtttgatttaaagtttgaaaattgttgttttaaatgtaatgcataatccaacaacactcttcgccaa

SEQ ID NO: 1044 - DNA, 210 bp, Glycine max
tgcctagttaacggtttgatggaaaaatttaaaaggttctctgtattgtttgtatatataaaaaagatgataatagggtaagtgttacgaaataaaaagaagccaaaaaatatattattattattattattatgtaaaaagatgagtaatagtttcgtaggaaacaaataaaggaagggaattgtatatgtatttgggaggatgaatgaa

SEQ ID NO: 1045 - DNA, 200 bp, Glycine max
agcttggattgagtaccgattcatgagtgacacagtaattaacacagtaacatattatatatatatatatatatatatatatatatgcataaacaaaattaaatattttactaattttaacttaatgactaacacagtaacatattttttggctacttagtacaacaaatcttaatttagatccaacaaagcaacaaaca

SEQ ID NO: 1046 - DNA, 122 bp, Glycine max
aaactttaggattaattcacgtaatatttatttatttttacttaaatattacattcaactttctaaagtaattaaatattattttagtctcaaattgttaattcacccattcaccttagttg

SEQ ID NO: 1047 - DNA, 201 bp, Glycine max
atgcttgcaatgctctttagtttatgggttaagtttaaacgactcaaagttatgttaggttattttttaatgttatgtttaaattatttaaaaataaatttttaatttagtagttataattttttaaataatattttttttattaatttattaactctattcataaataaataaagagtggatcacatttacaaatacacg

SEQ ID NO: 1048 - DNA, 158 bp, Glycine max
aaggaagaccacgtgaaagtgtaggagggtgaataagtactggacttgaattcataagagttttcgtcgccggaggaggaggaggatgagtaggatgaggggaggtaaacgttgttgtgagtatacccacagacctcaactacatctgcctccaccac

SEQ ID NO: 1049 - DNA, 110 bp, Glycine max
gcggattccgtaaacatatgaatttagtaaatgtaatgaatgaatgaatgtaaaagtgaaaagcaacaaaattacaaaccagtgcttatctgatgagcggtatctgggac

SEQ ID NO: 1050 - DNA, 128 bp, Glycine max
aatgatgcataaagtcatgtttagtaattaattaattgttttatatattcaaaggattgatttaataaaataattgtccttttaaaagtttaactgaaattttaattttgaggacatttattgaaagg

SEQ ID NO: 1051 - DNA, 306 bp, Glycine max
tgaattcaaatgaacttaaacaacaattttaatttttttacttcctaaataatgtaaaataatatttttatataatcaaatgaaattatctcagattaattattatatatgcatatgcatatatatatatatatatatatatatatatatatatatatatatatatatcatagaaattatttaattaaggaattataatattttatctaaaaaataaaatatatatttctagaaaagatataaattatagtttagttacttattataatctacacgaaatataaaaatttcatacatcacacgggt

SEQ ID NO: 1052 - DNA, 154 bp, Glycine max
tgtaaatgccttaccaaacaatatatatatatatatatatatatatatatatatatatatatatatatatatatatatatatatatatatatatcaaattatttttacttttgctctacatttgtcatcagcacatcatatccaatggctcacc

SEQ ID NO: 1053 - DNA, 242 bp, Glycine max
tcagaaggcacgaagaagtttttctaaacacacgtatagtatgtttggataaagaaatttaaaattctaagaaatttaaaattctaagaattttaaatacttcaattgaaattcttttattttcaaaattgtgtttggataaaaataaaataaaattatgaggatgaaaaaattgaatgaaaaaaaagagaagatatggttggtgtgctagttacacgtgttcctctatgctcacacccgat

SEQ ID NO: 1054 - DNA, 100 bp, Glycine max
agaaccgtcaagggacacagcttcttatgctcatcctcaaacttattattattattaccatgaggatccgcaggtagagaatgcaacccatttgaaactg

SEQ ID NO: 1055 - DNA, 106 bp, Glycine max
aggaggtagatgctgtcggggtctaaattggggggttgttgggtcgaagaagaagaaggctgaacgaggaggattaaggaacagaggatgaagagggagaatgcaa

SEQ ID NO: 1056 - DNA, 82 bp, Glycine max
tggctcacaacaaccttttgcgttgtcttttcttttcttttcttccgctgcttgcttgatgctactaatgtttcctccaccg

SEQ ID NO: 1057 - DNA, 107 bp, Glycine max
caggaacatgtgactttgcaaagcgagacctgactcatttttataacaatatactttcttatctcgtatcatgtgtgtgtgtgagtttgtgtcggtgcgaaattaag

SEQ ID NO: 1058 - DNA, 80 bp, Glycine max
ggttggatttcaactctttgttaaggctgcctatctatctatctatagcattatccccccaagaacaagggagggagaga

SEQ ID NO: 1059 - DNA, 95 bp, Glycine max
gggtgcattagttgctcaatatgatgctacacctatgtgggactccccatatatatatatatattgaatttgttccatgcttccacacaacatca

SEQ ID NO: 1060 - DNA, 205 bp, Glycine max
ggattctcatgatctcctaatgaactaaactggtttctactcattaaactcatatcaattttttttaatagtttaatagactcactaaattaaattcattatattaataatattataatataattgtcatccacattaattaattaattaattaaaaattataaaattcgtaacagtttcatctaaatttgtgctttggcttctc

SEQ ID NO: 1061 - DNA, 252 bp, Glycine max
aaatgcttaaactttagtccctaaagctaatttttttcttatagaataattaaaatctagaaatttcaaaaaatatacgaattaaaatcaatgttttaaaattgtggacaaaatcaattgttttcagtgactaaaccccattatatatatatatatatatatatatatatatatatatatatatatatatatatatatatatatatatatatatatatatatattgaaaaataaagttctaacaaacgggcc

SEQ ID NO: 1062 - DNA, 120 bp, Glycine max
cctgcgtgaccatgaatactatatattaattccaacatttacatatagccatgagaagaatatatatatatatataatcacctcaacacaaaacaactcaagtgtgcatgtgaccagaaa

SEQ ID NO: 1063 - DNA, 166 bp, Glycine max
cgcaatcaaagacctgtttttacgaatagtatactatatattactggattctgatcatagaaaaactatttgcatctgtgaaattattaatttcttagattgagaaagaagatatatatatatatatatatatcgagagagagagagagagagagagagcgcgcta

SEQ ID NO: 1064 - DNA, 183 bp, Glycine max
cgcaatcaaagacctgtttttacgaatagtatactatatattactggattctgatcatagaaaaactatttgcatctgtgaaattattaatttcttagattgagaaagaagatatatatatatatatatatatcgagagagagagagagagagagagagcgcgctaaggaaatagccaaggca

SEQ ID NO: 1065 - DNA, 322 bp, Glycine max
gcccaggaggaactttatattttataaaatattaaataagagtttaatggttatggaatgttagtacggaacacttctacattatcatttaatcataatttattgttattcaataataatatacaactttttatattattgtataatttttttctcattaaattatatatatatatatatatatatatatataatatgtcttgcaaacatatatactattattatttaatattagtacttattatacaagtaaataggagaattaataagttgatattataggaagatttaagttttttttaaagagaaatgctgtagcttg

SEQ ID NO: 1066 - DNA, 105 bp, Glycine max
gctctatgcgatctcacgtacacacacgcacacacacaaatttaggacgatactgtctcatgtgatttgaaagtggaagagttttagttcatctgcgtgacctct

SEQ ID NO: 1067 - DNA, 295 bp, Glycine max
taagtcccgtttgggtttggtcttaattgtaattaatttttaaaaattataaccagattctagtgtatagttttagttttgttctaaaaagttgttgttaattttataaattttaaaaatatatgttgttgacaatagtaattattaatactactactactaataataatttcacaaatcatgtatttttttagttcctactacctagaataataatgataaaaaatactaacaatcatatcaccatcatctattctttctatatgtataataattttggtattgttggcgataa

SEQ ID NO: 1068 - DNA, 229 bp, Glycine max
accttcgaagatcaattcaacaacaaaaatataaacctcaaggtttatcaaataatcaaaattccaaatatattatagctcattttctcacatatatatatatatatatatatatatatatatatatatatatatatatatatatatatatatatatatatatatatatatatatattatagctcataattaattattttagtgtataccttcatttcttccgcaatgt

SEQ ID NO: 1069 - DNA, 120 bp, Glycine max
tcggcttaattctgagcatgtagcactatatatatatatatatatatatatatatatatatatatatatatatatatatatatatatatatatatatattaaccaatgtgaaatcatgaa

SEQ ID NO: 1070 - DNA, 110 bp, Glycine max
ctttagctccagcccattggattgggccctcttggagccgtgttcgggacaatatattagttgttgttttatttgtgtgtgtgtggcactagcagttcaggatcgttaca

SEQ ID NO: 1071 - DNA, 359 bp, Glycine max
ctcttggagccgtgttcgggacaatatattagttgttgttttatttgtgtgtgtgtgtgtgtgtgtgtgtgtgtgtgtgtgtgtgtgtgtgtgtgtgtgtgtgtgtgtgtgtgtgtgtgtgtgtgtgtgtgtgtgtgtgtgtgtgtgtgtgtgtgtgtgtgtgtgtgtgtgtgtgtgtgtgtgtgtgtgtgtgtgtgtgtgtgtgtgtgtgtgtgtgtgtgtgtgtgtgtgtgtgtttaagagagagaaataagattcttaaatgaaataaaatatattctattaaatttagtttaattttattatatactaaacagttcaaataatagcaattaattttatttcatgctattcaggca

SEQ ID NO: 1072 - DNA, 114 bp, Glycine max
tctaattcaaatgagattgactttagtagatgatatatgtagtatagaaaaaaaaagtttaaggaatatatattttatatataatataatatttggttcgtgtgtgagctgttg

SEQ ID NO: 1073 - DNA, 123 bp, Glycine max
ctccattggtatggttggcaatattttccaaagtttcatactcaatactactcttcatactacaacttgcattcattcattcttctatctttgtatccaagacttgctttccttgcctctctc

SEQ ID NO: 1074 - DNA, 265 bp, Glycine max
agcaagtttgaagcaacgtgaaagacatgcactgatgcaccccatctcattattccctcccccgtgacaaaaaaaaacaactaaactttacctttttaaaaaaccattttacactttttgatttgtttcctatatttttttttttgtataactaaattctttatatatatatatatatatatatatatatatatatatatatatatatatatatatataatcactaaaccctcttatacaagtaggaaatgtgagaaataatggg

SEQ ID NO: 1075 - DNA, 110 bp, Glycine max
gaagaatcatgtggtggtggggtggttgcaagcaataataataataatgccaagttgccctacaagattcgttcggcttcttttaggattagtgcttccaaagtagctgc

SEQ ID NO: 1076 - DNA, 182 bp, Glycine max
gcattgctaacgcagagttaagtctatatgttgtgttattctcaattgatacattctgtcatgtcatgtccaagttggcatgttatctagtttgttagatactagatgaaataagaatgaaggaatgtgatgataaatggaagaaaacttaagtgatccaattgagacaattggagggaagg

SEQ ID NO: 1077 - DNA, 131 bp, Glycine max
tccaacaaatgtgggactaaaaatgcaactaagcctaaaataaataaataaaaactttttcaccatctactattttacttaaaaaaatccataactaagacaatcctaattaccatgaagaataaaggcct

SEQ ID NO: 1078 - DNA, 100 bp, Glycine max
gaagaggctccaccagttctgagcacaaggcgtaggagcttcaattagtcgcaaacaggttgagtgaagtgaagtgcagcattggaaatgaagcaagagg

SEQ ID NO: 1079 - DNA, 103 bp, Glycine max
gctcatccattcgttgactcccataaattgcgctgacctgggtgatgatacaaataataagaatgtatgtatgtatgctactaataggaggaagagctaagcg

SEQ ID NO: 1080 - DNA, 201 bp, Glycine max
ggcttgtcaaggcattttagttggtaggcttacattactaatttagccagctgaaaattatgcagaagaacgttagtatacttctatatcaaagtagagattgactctactagggaaatattatatatttgagttattattattatatactatttattatctcttcattttttttcatgatataaccaacccatcacatct

SEQ ID NO: 1081 - DNA, 359 bp, Glycine max
tggatgggatggttaaagaaaaagaaaattgaaaaaaaagtaatggattcaatttttttactaacaaaattaatattttaataacctatatttactgacaaaaaaaattacctttaatacgagtctttttaaaaaaaatcaaaatttaaatttttattgcattttgctttctttcaatatattttttagtgtgaaattacaaaaaatcatttttataaaaataaaataaaataattcaaaatttgaatgatcaataaactattcaatcaaattacattaaacatgtttctcatttcttatttattgtgctcaatatgtgacaatttcatcaagattattagctggaggcaagaattcac

SEQ ID NO: 1082 - DNA, 180 bp, Glycine max
tgatttcacgagatttagttttattattcaagtaatgaattttactttaaaaaaataaaataaaataggtgatataataaaaaaatataaataatatatttcttatagaaaaccagttcaaacttatcaaaaacagagtttaacccagttttgaatcaattcaaactaattcacatccgg

SEQ ID NO: 1083 - DNA, 173 bp, Glycine max
ttgatgcacggttaatgaaaaaattagtaattgaatgattatatatatatatatatatagctatcagtgtatttaaattaattcaaaaacatagttaatatctaaaaaaccttaaatacatttaattcatttaagaagaacatataattcattgtgatcttattgtttgacca

SEQ ID NO: 1084 - DNA, 113 bp, Glycine max
aacattggattggataagataaaaaaaaaataaaaaatcttgactcaaaaggatgtctagtctagtctagacagacaaaattaaattcccctcctctttcattcaaattggca

SEQ ID NO: 1085 - DNA, 123 bp, Glycine max
tttgaggcactccctattttaaaattcaaaaaatataataataataataataataacaatgaaagaaaatggaagagagggtgagagagagatttgtccgtgtttattgtttgcacaacccac

SEQ ID NO: 1086 - DNA, 323 bp, Glycine max
ttcatttacataacaaatggaattccttaatattagtaaaaaaatataaaaatatattaataaaacaatattaaaaatatattaaataaaataatattaaaaatatataaaatattaaataaaaccatataaaaaatatatacaaaatattaaataaaacaaaataatgaaaaaaagtatttattaaataaaaaatcatttacaatttttttaaaaaaattaacttaaaaaatatttacaattttcttaaaaaaataaaataaaaacatttattattttaaagtcgtaaatctaaaaaaaacatttatgactttgacttcaaa

SEQ ID NO: 1087 - DNA, 220 bp, Glycine max
tttcggttatgctatttcgtaagattgttcatattttttttcagttttattttaattctttttaattttttaatatattctattgaatacatattaaattccattccatgataataataataattaccttttttaaaaaaaatcaattattaaatatttattaattttataactaatgtcatattttaaaaaaaaaactataaccaatgtcattagaccg

SEQ ID NO: 1088 - DNA, 95 bp, Glycine max
atagatccgccgaatgatggatgcgcttaatttggctttattgttccacacacacacacacatactcacattcagcttcagcttctcacccacac

SEQ ID NO: 1089 - DNA, 138 bp, Glycine max
ccattggcaaggttaggtaccctttaagatgattcacatttatcgttgacaacttttgacattattatggattcgatcatgatgatgatgctgtccttaacaactatatatggatatatgtattgctcagtttggaaa

SEQ ID NO: 1090 - DNA, 154 bp, Glycine max
aaactgccacattccttattattagtttcatacatatatatatatatatatctaaaaaatagattaagataagattgttggtgatagaataagatgaaataataagaaaaagaataggaggagaaattgagaaggtgagtggttgtttgcttgc

SEQ ID NO: 1091 - DNA, 165 bp, Glycine max
gggagctaagttcctggttagctttttttaacttccagaaactcaagattcatttgctttgctttgcatgaactaataagttgtaatttcttttcattttaattttcatatgactatatctgttttatagaaacctttggtctggttattgtctctgtacccgcc

SEQ ID NO: 1092 - DNA, 83 bp, Glycine max
aaagcatgtgggtctcaaaaattagggagtgcaacccatatgaaattcatctaataataataaagaatgtggcaaagaacgag

SEQ ID NO: 1093 - DNA, 110 bp, Glycine max
ctgcagcagctttgacaaaacaaaaataaataaatatagaagtcaatcataaaattctttaatttcttcatagttaggattccccaatttctaaatccattgaaggccat

SEQ ID NO: 1094 - DNA, 163 bp, Glycine max
tcggtttctgatttgtcttttggcccctttcttctctgttgtgttgtgttctcccatcacgttttttcttctacttctttcattttcttcattgtttttttcaaatggattaattattttattaatgttaatattgactgtgttatatgaaagcacatgtcgc

SEQ ID NO: 1095 - DNA, 167 bp, Glycine max
cagtgtggatgctttgtagataggtgaatttttttaagtatcgtgcgaaaatttagggcaattagataaatacattaaaacttttcattttttaaaaaataaataaataaataacagaatttggctaaatttaaacagcaaatcttaacaagaacaagatgcagacg

SEQ ID NO: 1096 - DNA, 98 bp, Glycine max
tttcttggcaccttgagaaaaaatcaatgcaataagaaatattaaaaaaagaaaagaaaagaaaagtatgtgaacttctaaaagtggcatcaggatgg

SEQ ID NO: 1097 - DNA, 212 bp, Glycine max
aatttgatgttgtttgtgattttcaataaatttaaattatgataaatgatagtcagttagaaatagtgtttctaaattatatatatatatatatatatatatatatatatatatatatatatatatatatatatatatatatatatatatcatatcatatgcatactaaatcatatatcataaagtttaggtcatggttatggctaaaggca

SEQ ID NO: 1098 - DNA, 109 bp, Glycine max
aatccagtttagtttgataatcggatcttcatttaattaattaattaaatttggaaaagacaacgaaagaagattatcttaaaggatatgagcaactttctgtcaaggc

SEQ ID NO: 1099 - DNA, 253 bp, Glycine max
tgcatgcatgtttgtaaattatgaggttagagagagagagagagagagagagagagagagagagagagagagagagagagagagagagagagagagagagagagagagagtacatgcaatagtatattgtttaatactagtattgattttgtgtttcatttagatagtcatgaacatgtctatattattttgataataaagccagtttgaatttcaccttcgaaatattttattgcagtgaacagggtggagt

SEQ ID NO: 1100 - DNA, 383 bp, Glycine max
cagtgaacagggtggagttagagttttaattttaggtggtttaagataaaaatacattaagaaaaagtgataaaaatgcataatttagttaaaaataaataaaatttggtgtgcataattaatttatgtaagaaatttattataattaataattcttatttaaaaataaaataaatatataactatagtctatattgagtataaaaatagcatataacaaaaagaatatatcaaatgaagtaatatatatatatatatatatatatatatatatatatatatatatatatatatatatatatatatatatataggaaaaaggagtcaaaaaatataagttaaacaaatttaggaatgaccataactccatctccttctttcgc

SEQ ID NO: 1101 - DNA, 177 bp, Glycine max
aaatgaattagaaagaaaggaaaattttcaaattttatttttaaaagttacctctttttcttttctttttttcattttctctcccatcaaataaaagaaaatatttcataaattgtgttttctttcttctttattttttctactctcactttatctcttatcaaatgcaccatgagc

SEQ ID NO: 1102 - DNA, 126 bp, Glycine max
cccacacaatccaacaaactcaaacattaaacaagagattccattgtgattaaaatactactatctattttcgtctagtaagtaagtaatcctaggtgggtgcaaaatcttctgtaaacgtgatat

SEQ ID NO: 1103 - DNA, 117 bp, Glycine max
tccctttgactttgttgtctaataactctaattagtgctagttattggatttgttttttttttttttgttgttgttgtttgaaacagaagttgacatgatgaaggagaggtttgcaa

SEQ ID NO: 1104 - DNA, 86 bp, Glycine max
ctcctttcctccacaacatcaacatcaacaacaacaacaacatcaaaccccatcgtcgcggctttggggtgaggagagtgttgtca

SEQ ID NO: 1105 - DNA, 140 bp, Glycine max
gccttggtacgtagttggtattacaatatcttactcaacagcctatatgtcttacttatggaggctttcttcttatatatatataaagaatcgaaaaataaatactttttcaacgatgctattttgtgaaacgtcatgct

SEQ ID NO: 1106 - DNA, 157 bp, Glycine max
atgacacatcatctagttcgaagaggggcgaaactatatatatatatataggggtaacaatcccctcaacttactaagttactttgcatatatacttaaaataaatatctgcccttaattattattggaccctaattgtaaatgacaaagcccacac

SEQ ID NO: 1107 - DNA, 209 bp, Glycine max
aaatgacaaagcccacaccccatagaacaaattatccattgctttatttgttttaataattatatatatatatatatatatatatatatatatatatatatatatatatatatatatatatatatatatataactaaataatttactttttgttgtaaatccccttaactttacaaaatataaatataaaattcaagctccttcatctt

SEQ ID NO: 1108 - DNA, 104 bp, Glycine max
cgaatggaactcaccaaattgaagagatgatgttgttgctacatggtcagaagaagaagaagcaacaagagggagtgagagttgtgaatgacgaactacacggc

SEQ ID NO: 1109 - DNA, 104 bp, Glycine max
gtcaatgaagcgcagacttgcgtcagccgtggtggtggtggaggttgtggcttcaatggatacaatcgtggtggcggtggatatggtggtaagggtgacgctag

SEQ ID NO: 1110 - DNA, 240 bp, Glycine max
ccaaatttgagtgaatggaggagaaaagtgaattctttttatttttttagaacatcaaacaactctctagaagattaaaaataaataaaaataatttatatgaagaaaaaaactatggagtaacaaaaatttgaatttaaatttaattttaatcaatataaaaataattttagtataatttatttatttatctacatattcaaataggtggagagaatttttttcaattcgtccttcctt

SEQ ID NO: 1111 - DNA, 120 bp, Glycine max
ttgcgaaccaggtttaatttggtacacagttatttatttggctagctagctaatcctggcaatatatatatagaccatagtgctagccaatttaaatttgtgagttgcattcgaagcttg

SEQ ID NO: 1112 - DNA, 139 bp, Glycine max
gccttggtacgtatttggtattacaatatcttactcaacagcttgtatgtcttacttatggaggctttctgttatatatatataaagaatcgaaaaataaatactttttcaacgatgctattttgtgaaacgtcatgct

SEQ ID NO: 1113 - DNA, 194 bp, Glycine max
cacatcatctagttcgagcaggggcgaaaatatttatatatatatatatatatatatatatatatatatatatataaccaaataatttactttttgttgtaagtccccttaactttacataatacaaatataaaattcaagctccttaatctttaatcttaattttcacttttacacgttagtccttcctccgt

SEQ ID NO: 1114 - DNA, 100 bp, Glycine max
atgttgttggtgcatggttagaagaagaagaagcaacaagagggagtgaaatttgtgaacgatgaactgtacggctaggaccatgacaaccgaacaccac

SEQ ID NO: 1115 - DNA, 103 bp, Glycine max
ccgaacaccactgtcaatgaagcgcagacccgcgtcagccttggtggtggtggaagcggtggctttggtggaggctgtggcttcaatggatacaaccgtggtg

SEQ ID NO: 1116 - DNA, 133 bp, Glycine max
ccgaacaccactgtcaatgaagcgcagacccgcgtcagccttggtggtggtggaagcggtggctttggtggaggctgtggcttcaatggatacaaccgtggtggtggtgggggtgatggtggcagatatggtg

SEQ ID NO: 1117 - DNA, 245 bp, Glycine max
ccaaatttgagtgaatggaggagaaaagtgaattctttttatttttttagaacatcaaacaactctgtagaagattaaaaataaataaaaataatttatatgaagaaaaaaaactatgaagtaacaaaaatttgaatttgaatttaattttaatctatataaaaatgattttagtataatttatttatttatatatctacatattgaaataagaggagagaatttttttcacttcgtccttcctt

SEQ ID NO: 1118 - DNA, 120 bp, Glycine max; identical to SEQ ID NO: 1111

SEQ ID NO: 1119 - DNA, 123 bp, Glycine max
tttaatccaaacagtccaattgttttaaaaaatcaatttgaaatcaaactaatttgaaaaatcaattttgaattgaattgattttaaattgggtttaaactagtttcaagaactgatcgattt

SEQ ID NO: 1120 - DNA, 98 bp, Glycine max
aaacacacacatcatcatccccggccatgtgacctctctctctctgctgcatgtatatatctttaccatagagccagatatcaggcatatattgccaa

SEQ ID NO: 1121 - DNA, 131 bp, Glycine max
aaggccaatgatgtgatgtcctttcgttctctaccaaactaaattaatatttggctgtgctgtattaatattcaatttccgtgtggttggttggttttttggaagtgttaggaagaagcatgtggaaagca

SEQ ID NO: 1122 - DNA, 98 bp, Glycine max
catatgcacccaccaagtatcctagcagcatcttctgcaaaagccctttcctcccatgatgatgagttgttgttgttgctggttccaaatggttgttg

SEQ ID NO: 1123 - DNA, 128 bp, Glycine max
tctcttgatccacagcaagtactgagactcctccatattgatcagtagcaaggaaaattaaaacctattgggagatgatgatgatggtaataagaatgagagtgagaaacaggtttggtggaagaagc

SEQ ID NO: 1124 - DNA, 130 bp, Glycine max
ccatgctggctgtgatacacttgttcatgattaatgtgtcccctaaactaatgggtaataagttaactttttcgtcaagtggtgacacctaaaataaaataaaatcaatgacgtgaagatttcaaccaca

SEQ ID NO: 1125 - DNA, 130 bp, Glycine max
ggcgcacatcattaacttagacgaggcatgtggtgtggtgtgtgggcccaggcgtacgctattttttctgttctttagcagacacatcataaaaaggtgggtgtgcatgtgcctcatggcacattctggt

SEQ ID NO: 1126 - DNA, 104 bp, Glycine max
caacttactgggttgggatacaataaaaattcatatttacaatttaacaaatggaattattattgtataataataataatgacaatgaagatttatgatcagtg

SEQ ID NO: 1127 - DNA, 174 bp, Glycine max
tggaggaagaggatgaaatttattgagctttatttcaagtttaacgtgataactaattttatttatttatttttgtacttgaatctcagaaatacattttaaaattaaagggaataactctttcctgttatgttaaccccccaaaaaaatattacttgctctgtcttattcccg

SEQ ID NO: 1128 - DNA, 108 bp, Glycine max
tggtgggaattctgagagtgtggaacaagatgtgatgcattcttataacatggcatttggtggtggtggatttgcaatcagttatgcattagcagctcaactagccaa

SEQ ID NO: 1129 - DNA, 95 bp, Glycine max
gtttctgccttgaagctggatccagaatattggaagaatgtacctctctctctttctctccctctctctccacacacacatgcgtgcacatacaa

SEQ ID NO: 1130 - DNA, 128 bp, Glycine max
atggctcctggataaagctatagaccaatctcatttatgctctatttagaaaattcggtaaggtgttgcttattcttttcttttctagcatgcataaatttggtgactggaacctcaattaggcctgg

SEQ ID NO: 1131 - DNA, 156 bp, Glycine max
aggcaaccctaccctatgtaaagtaagtataaaccactgtacacacaaattacaattcctaagcacacacacatatacatgagttcaggtatttcaaatgcacatgcagaagaagaagatctgatggatccagcatttacactgacgcaattggag

SEQ ID NO: 1132 - DNA, 116 bp, Glycine max
aatcacactcactcgttgctcgctgcgaatcgggaagttgcgtcgcgtcgcgtaattcggcgattcaacggaaacgttgacggaactccgtggcactgatcctcgtcggaatcttc

SEQ ID NO: 1133 - DNA, 250 bp, Glycine max
catgcgatgtaataattgaaaaattattaaatagtgtttacactgaaaaagaaatctatatatctatataaataatataatatgataatataaatataattatcttctccaaaattttgactctcaatattttattttaaaaatatgtacaaaaatggacccgtttttcagaattttatttcataatactataatattattattattatatatgaaagtgaataagtaaaacttagacccaattgtagga

SEQ ID NO: 1134 - DNA, 239 bp, Glycine max
tcctctttcatagcctactttatttttattaaaattatttgaaaaatataaaatcaagagtgagattattattattaaattttaagactaacaaaattttgtgatttcttttcaaagaatgtaatcaaaagagtgtgttgaatattgttactaagatttctctaaaaaggaatttattaacttggatcaagtatcttttcaccaagtctaacaactaaaatatgcaacataacgtgctt

SEQ ID NO: 1135 - DNA, 168 bp, Glycine max
cagggtcaccggaatacgggaaaattatttatatatatatatatatatatatatatatatatatatatatatatatatatatatatatatatatataataagcctaggtcaaagaacatctatgtacgtacttaattatcactagtgtccaacagtcaagatcatcct

SEQ ID NO: 1136 - DNA, 111 bp, Glycine max
accacgcatacacctcacatcttgcatatggcaacaccatagtatatgtgcgttatattttatttatttatttattaaaatgcacatatactagtggagctaggcagagac

SEQ ID NO: 1137 - DNA, 254 bp, Glycine max
ttcactctccatattgcgtataataatttataatttacaacataagagtaaatagtgaatttgtttaacttttaaaaattctctcaaaattccaataaaataaaatactgtttctctaaatatattgaattaaatggcatttagtatagtttaatgaatattttaattatttaaaatacaaaattatttttatatgataaacatattttcacattattattttgtatttttccttaaccattactgcaacctgg

SEQ ID NO: 1138 - DNA, 116 bp, Glycine max
caacgtggaagtgaaggaggagagggagaagaagaagaagtaggaggaagaaaaggggaaaacgcaaagaaaaaaagaggaagatagatcaagatctcccttgcgtttgtctcagt

SEQ ID NO: 1139 - DNA, 246 bp, Glycine max
ttgattgcaaagggtgttgttgtaaaacttgttttttttttttaatatgatatcaacatggagtatctatcaattgatgattaatcttaattgagaaataagaaatttgattaattatctttaataaaatattttcttttgatcccgtttttatttatttataaggtttgatctaacatcgtgtttaatcgcttaaatcaataacatgttggttataaagttcttgtttaacagagacggccttga

SEQ ID NO: 1140 - DNA, 136 bp, Glycine max
ttgcaccataaggtctctgtcttaatggtgacatatttttattttattttaatttgtataaaagttttttttaatagatcttagatagactttatgaaagtgttcatcaaataagattatttcacatttggattca

SEQ ID NO: 1141 - DNA, 181 bp, Glycine max
tggtgagtcttggcatttaggtaatactaagacacaagtttctccttgtagctagtattagtaatagtagtaaataagcctagttatgttcttaacattacattcaggttcagttgtatcttcatgtcaaggagaatttttctttgaatatatatatatataccaacaaccttacttccca

SEQ ID NO: 1142 - DNA, 106 bp, Glycine max
aatgttgctcggtctcaggatcatcatatcatctccttttatttttgttgaaaataataataataatgatatacttaatactttcaagttatttcaacattaacaa

SEQ ID NO: 1143 - DNA, 107 bp, Glycine max
tagcgaaccatccaagtcctgcaagattgggaaaatgtttgttaagaagcactaaactaattgtagagagagagagattttaatgacattcatgataactttcacca

SEQ ID NO: 1144 - DNA, 115 bp, Glycine max
tgtgtttgatccaacttctttctttattttattttatttttagttgttgagagaccaaaagtttgtggatgatattatgtctcgaactccgattaaacgtatagcagaacccgaa

SEQ ID NO: 1145 - DNA, 357 bp, Glycine max
aatctggacaccaaatcgatcaattcaaaatatatattaactcggtttttatttataagatgtaacttttgaaacttattaattattttatataaaactcaatctagtattatgtattaattatttctaaattaaaaatatttttaattaaataaaaagcttatattagcatacatttttaaaaaataagcattaatgataataatatttttgaaaaaatatctaaatttaagataaatttattattatcaactaaattaattaattatttttttaatcttaatgaattagattaattatttttcttaatcttaatgaattagataaccagtggttttataaacagcaacgaggagg

SEQ ID NO: 1146 - DNA, 235 bp, Glycine max
tgcctcgtgagtcaagtttactagtcagacacaagtttcaatcaactgtgataatgatatccatatatatctttttttttctttttttcttttcttttcttgtaagatgttcaagttatattttatcttttcatgaaaaataaatgtgctttttttttcatttgttcttatataaattaataagatcttatctaggtaagccattactatataattgagtcagtccagaatattt

SEQ ID NO: 1147 - DNA, 277 bp, Glycine max
tgcctcgtgagtcaagtttactagtcagacacaagtttcaatcaactgtgataatgatatccatatatatctttttttttctttttttcttttcttttcttgtaagatgttcaagttatattttatcttttcatgaaaaataaatgtgctttttttttcatttgttcttatataaattaataagatcttatctaggtaagccattactatataattgagtcagtccagaatattttattttatttttttctgagtaaatctcaagtagtgttgtcaa

SEQ ID NO: 1148 - DNA, 234 bp, Glycine max
tctgagtaaatctcaagtagtgttgtcaatattttaaaacacaactactttttgtattgttttattttttcttaaattaaacaactctatttttattttatttttctcatattttcattcattttatttttctcttcttatttttatgcattgtagaaaaaaattatccatttataattatacaaatttaaccttttagttcttatacttaaatgtttcatcttgtttggtttc

SEQ ID NO: 1149 - DNA, 141 bp, Glycine max
gggtggtcacactcaaagaaaaacaataataataataataaactaattgtgagttaaagatcatatgtttaatatagttgatgatgttaaaatagttgaaaaatgttaatgtcttattagattctttgatgatttgatgag

SEQ ID NO: 1150 - DNA, 141 bp, Glycine max
taggaccaccattgtccaaccataaaattaaaatatatatatatatatatatattcaaactcaaatcacttttaggcacacaatacaactcataactgaaaacaaaatcacgaaaacaattcacacttaaactcgaacgcg

SEQ ID NO: 1151 - DNA, 143 bp, Glycine max
gagcctgagagcatgaaatcatcatggtaaaaataaacaataagaagagagaggacttgacaaactgaaaaggagaatcgatatttctattttaataaaataaaaattaaattaaatttcaattttcttatttggttgatcaa

SEQ ID NO: 1152 - DNA, 100 bp, Glycine max
tgaaattggaatggaaggtagtaagagagagagagaggaccacatgcgtgtctgaaaaggaagaagggttggacctagcgtggatggaaatgattggtgc

SEQ ID NO: 1153 - DNA, 132 bp, Glycine max
tctcactctcaccgcctagaaaagaaaaccttttcccccaccccaccccatttcaatggctcctttccctctctaataagggttcctctttccttctctagcacaatttacaatctcaatggctggaatttg

SEQ ID NO: 1154 - DNA, 96 bp, Glycine max
actggacacaaggtgacgaagaaggaatccaaagtagactacgacgacgacgtcgtttcggaaactaagaacgtaactgtttcggaagttgaagaa

SEQ ID NO: 1155 - DNA, 106 bp, Glycine max
agggatcaacgacaatcatcaaactacaacgacgttaattaattgattgattaacggagacgagaaaccaaaccaaactaaggaatcacaaatgaatgagatcgcc

SEQ ID NO: 1156 - DNA, 96 bp, Glycine max
gctctccaaatagctatccaaacacagcttttgtattttttatttatttattctgaaagtacttttgaaaggagtgtaatggtaattcaaacatgg

SEQ ID NO: 1157 - DNA, 213 bp, Glycine max
tgattccctacaagctcaaatacttgatattatagaagtcctgtaatcactaaattgacttgttcaaaaaataaatttaatttaattttggtaagattttaaaacgtatttaattttactttatttttaaaaaaattgacatgatattttttattaattttaaaaatgtcaattttttaaaaaattattaagaaagtctaattcaattgatga

SEQ ID NO: 1158 - DNA, 99 bp, Glycine max
caattgatgaatatatgtgagttgtaaatctttaattacttgatttcaattcatataaataaataaaaagtaaaatatcattcgacacttatgatttgt

SEQ ID NO: 1159 - DNA, 192 bp, Glycine max
tgggccatggactagttacatctaagaatcaattttcttcttcttcactaattatttctggaaaaaccattgaatttgatcttaaactagtatatagtcattagtcttctttaaaaacgattagtttacctaatttggaaattagcttaagtgttatgaaaccttcttgatatggtcaaggctattgggctt

SEQ ID NO: 1160 - DNA, 123 bp, Glycine max
ggcagaatcagtggacaaatttttattccccgaaccaaagcttggtgttacaaattcaaccactaatctaaacatatgtgtgtgtgtgtgctgcgcgctgaggttgactgtgaatgctccact

SEQ ID NO: 1161 - DNA, 81 bp, Glycine max
ggaataacacttgaggcttgaaaaaacatccatccatccaaatttatataataaacaaaaaaaatttggcgacccatattt

SEQ ID NO: 1162 - DNA, 143 bp, Glycine max
atgcgggtgaggatcttaaccctaagtaatctaatctaataacataaaattagcttattttaaagatcattatatgttaaaacaaaatggaatgataaagtattaattgtataaaattttgtatacgccatctatttcatgaa

SEQ ID NO: 1163 - DNA, 216 bp, Glycine max
ggcacggcttaatgtttattgatccacacttttcatcatttaatctatgtttaatatctcattgctagtggggaaattgatcaccaatccaatccaaaatgtagttatgtaattagtttattttatcttaaaaagaagaatattaaaaacacttgactcactcctcataacaccataactaaatcacttacacgtaggtctcagtgtgcccagatt

SEQ ID NO: 1164 - DNA, 116 bp, Glycine max
gacacgaaaggcctatagaaaggcctatatatatctatatatatgtgtgtgtctgatttcgaaaagtaagggagagatattctaagagaaatttattgtcaaatgctctctcaaca

SEQ ID NO: 1165 - DNA, 258 bp, Glycine max
gggcataggttgaaagtgtctctatctataatataaaaaagaaaaaacactttaaaaaagtagtaataattaattttaaagatttatgaataaaataaaaataattacatttaaaggataatttaataataaaaaatatatatgccaaaatgaataattatctttattaataattataaatatattattattatcaattaatagttaaattaagtcacacataattaatttaactacgtgacaaacactgattaaatt

SEQ ID NO: 1166 - DNA, 180 bp, Glycine max
acgtgacaaacactgattaaattaattctcacattatttatttctcttcccctttaaaataaacaaaataaaatataaaattatcatgaattaaaattacaatcgcatttaataaaaaatccattaaaatcaatcaatcaacaatatcattattatattagtacattcacaatctttgtt

SEQ ID NO: 1167 - DNA, 165 bp, Glycine max
tcatttgttgacatagtattgattttagattaagaaatttgattgattgatgttagattaggaaatttgaacacgtaaatattgatattggattaatttgagcttaacagtatatatcacaatagataatgatgtttcttttttatctttgtccaagaattgcaa

SEQ ID NO: 1168 - DNA, 138 bp, Glycine max
aggatttgcgcatctatttttttaaaataaaaattaaataaacgagggagagagagaggatagaaattaaattaaataggaaacaagagtgtacagttgctttgaaatagaattttagatgtagttcaagcggtgggt

SEQ ID NO: 1169 - DNA, 96 bp, Glycine max
aacgagggagagagagaggatagaaattaaattaaataggaaacaagagtgtacagttgctttgaaatagaattttagatgtagttcaagcggtgg

SEQ ID NO: 1170 - DNA, 105 bp, Glycine max
gtggatatcatcgttactgaaaatagttacttatagctagttatagattttggttcctatatttatttattttttctggttgatttgtatcgagcttgcttggtt

SEQ ID NO: 1171 - DNA, 211 bp, Glycine max
cagcacagccaattcttttgcttccttagtctttacggaattccacattttattaagaaataatataatacaatataatatttaacaaatggaaaatcatatttacagtgaaataaccattttttcattgttatagaccaccatgtaattttcttttcatttttcttcttatgttgtttctgtatctttccccaaggagggttgagtggag

SEQ ID NO: 1172 - DNA, 428 bp, Glycine max
gtttgaaactttagttcaatctgatttgatctaatttaaaataatttgaattagatcaattttttattttaatcatatttttaattttttgaaaaatattaaataaatgataaaataatatatatatatatatataataaaaaaaattaaaatatcaattttttttgtttgataacaatatcaaatattttattcatatagcattgtataattaaaaatagtatacttttaaatatatattatataaaaaataaatttatacaacttaataataaatatatttatgcattagttaaaaattatttttaaataaaaatatttttataaataggtataatttatgtgataattttataaatacacaaagaaataaaaatataaacacgaaatgatattatcacgcaaaaaagaacttgaaaggacctaca

SEQ ID NO: 1173 - DNA, 182 bp, Glycine max
cgttatgttgccttgttgtgttatgaaataatgttacctccctctctctaacctcactttaactccttcatttcttctttcttttctaaaacctcaaaccgcaacacaacacaacacaacacaatacaagtttcgtattcgtaacgtaacttgtttctcccttcttcctctcctctctccgt

SEQ ID NO: 1174 - DNA, 132 bp, Glycine max
tggaacgttcaccctaaaatgatgaatgaaaagagaataatacagagtgagagatagatagatagatagataatggatggataaatgttttatatttttctcagagaaaacttcagacactatgcatgtggt

SEQ ID NO: 1175 - DNA, 296 bp, Glycine max
aagaaatgccaattgctaaaaccatagagaaatcttagtactgatgaaaatattagactatttgatgcttataatagtataaatctttaaatatataccgttaaagaataaatttacataactagataattacatttattaattacatttatacacatttattcaaatagttgtaaaaataattttaattaaatatatttttataaataaatataagttatgtgataattttataaatatataataataatatatatacatatgtatatgtataagttcagtttggattcaattga

SEQ ID NO: 1176 - DNA, 121 bp, Glycine max
cattgatttgtgattgaatgataatataaatttttttttacagagtcaatttataacttttttttctcttgaatttattttctcaataataataataacaagttgaacctcatcaaattgt

SEQ ID NO: 1177 - DNA, 130 bp, Glycine max
aatccctgctgtttaatgcaatatatatatatatatatatatatatatatatatattcacacgcactagcacgttgacaatgataccatatagcattggaaagtcttttccaaaaccttcgaaacatgca

SEQ ID NO: 1178 - DNA, 121 bp, Glycine max
tcgccatggctatctctggtacctaactctttttaatttccatttttcttttttaatttgagattttgggggaaaaatgtttcttcttcttctttttttttttttgctgtggtaatggaag

SEQ ID NO: 1179 - DNA, 149 bp, Glycine max
cactctcactttgttggaacttcttattgtttgttcttctaatatgctggtatttatgtttattgtttaatgtcttcagtatgagtgtaattcttttatttatttattaaatgttattgtattagtaattaaggtcagccttgttcttt

SEQ ID NO: 1180 - DNA, 115 bp, Glycine max
aatcagcgggttcaattatataaatataaataaaataaaatataaaaatataagattttatttacaaatttagtgaatttaaaaaaatgagggggtacaagtgcacaccttcaca

SEQ ID NO: 1181 - DNA, 308 bp, Glycine max
cgccgttctctttctctttccagtttttgcaaaaatcccattttacccctacttatacttataccaagagtcaacaatatagaatgtccattttagattttttatttaattttgaatgcttccattttatatattgttatgattattttacactaaattattattattattattattattattatattgatacaaagtatttattgtaggaagtagtgactaatctttattgataattataaatacacaagctgaatatttatttttaacatgattcattccttgtggtagcatagtcccaacgaaga

SEQ ID NO: 1182 - DNA, 209 bp, Glycine max
aaagaggcaaatgttaatgaatttgttaaggatactatccggtataaattatttttaatataggcttacatcaataattattattattattattattattattatttcacaataaatggccattactatgacagtttatttgaaattaaaaatgtccataaatgacatttatttagacaataaaaagtcacatcctcatctcagctcaa

SEQ ID NO: 1183 - DNA, 223 bp, Glycine max
agcaaactgtcgtgtgtgttgaatgtcaatactccaaaaagtgctatgttatatatatatatatatatatatatatatatatatatatatatatatatatatatatatataaaagcggttgaaaaaaccatgttaactgtttttgaaattgaattatcctcaaacctaaatttaaagatggtgtttgaatctactattttatattaactggtcctcaaatgca

SEQ ID NO: 1184 - DNA, 101 bp, Glycine max
agtctaaggaagccttataggaattactaactaatttggtaattcatttatttttctcttcacttaattaattaataagacttcttctattatcccatcct

SEQ ID NO: 1185 - DNA, 227 bp, Glycine max
cgaaccatgatgcaatttcttgtcatcgttagctttaggttgtgtatagtaccaaatacaatgatagaagaattaagcatcatatctatccatgagttgaaaatgacttaacaaaacaaaatacttaacacgatcatatctatccatgaattgaaaatgatttaacaaaacaaaatacttaacacaagtatttgaagaagaagaattccatgaatcttccaagactg

SEQ ID NO: 1186 - DNA, 101 bp, Glycine max
acgtggttgagaggcttttatgttggtgactcaagtaatatatatatatttgcatgttagatttttctttttcatctacttcataaggctgttgaaccttc

SEQ ID NO: 1187 - DNA, 306 bp, Glycine max
tttgccttcagaacaattttgtcttgtttgttttcttttttaaagtactagctttgtttcaaaataattattgtctattttatacctataaaaaattaataaataaataaaaaagtgataattttacaatttaaccttatatcatgattaattcatgatttaattatataattgatcttttattaaaaatttaattgagtctcttaattattgaaaagtttaattaaatcatcaattattaaaaaaaatcaaccatatcctttattgtttaaaacattataattatgctctttcaaccaactctgt

SEQ ID NO: 1188 - DNA, 125 bp, Glycine max
aattagagaatttgattgaactttttaataattaaaaaattaaatgaatttttaattataattaaaggattaattatatatatataagctttaatgtatttataatttttggtgtccatcattaa

SEQ ID NO: 1189 - DNA, 204 bp, Glycine max
tggaggagaggctaccataatggtgacaaaggtaacaaaattgaaatgaatatatatatatatatatatatatatatatatatatatatatatatatatatatatatatatatatatatatagtgcatattatatattatatataatacagattggagctttcaatatttattttttcatttatttatacaggtcgatgagcca

SEQ ID NO: 1190 - DNA, 98 bp, Glycine max
agcatgtgattaggaagctctaagtttgtgtctgaaatgtgtttgtttgtttcatttgtttttccttttttttccgcatcccaatccgtttctctttg

SEQ ID NO: 1191 - DNA, 100 bp, Glycine max
cacatgtgcatgctgagagaaacaaaacaaaacaaaaacaaaggtgttacaactttattacctgctgttaattaattttctgtatctaagcctttggcga

SEQ ID NO: 1192 - DNA, 197 bp, Glycine max
ttatgcatcggaaatgaaaattttagagagagagaaattgtataaataagaaatttaaaatttcaaaaatataaaatataacattaaaaatccaattaaaaatcatatcatatgactccgatttattactcttgtccctgtcaaaaagtaaagtaacaaatccatatgtgcaaagtacatgtctcttaatggtgccc

SEQ ID NO: 1193 - DNA, 199 bp, Glycine max
tggcatggttaagcattagttcattgacaaattttaagaaagaattcgattgaaataagaattaattttctattgtatatgattcttttgattttttcaaaatacgaatatatatatatatatatatatatatatatatatatatatatatatatatatatatatatatatatatataattcaaatctttgtttggttg

SEQ ID NO: 1194 - DNA, 153 bp, Glycine max
ggatgagagggtggagattaaatttagtcattcatatgttttctatttttgtgttaatttatatatatatatatatatatatatataattagttataattattttaaaataaaatgtgaataaatattaaaaggtaaatctattgtgagactt

SEQ ID NO: 1195 - DNA, 100 bp, Glycine max
atttgaaatcgcctcctccaaatcaagcatctatggaatgaatcaccaaacaactagacttcattattattattactactgttattccagcaatgtgagc

SEQ ID NO: 1196 - DNA, 130 bp, Glycine max
aaccataagtttgaacccaattggtttagaacccaattgaattgaattggtttatagtccaaccaatttatcaaaattgaatcaaactgttataaaaacagttaaatgcactgataattgatttgccctc

SEQ ID NO: 1197 - DNA, 120 bp, Glycine max
gctttcgaagccaagaatctctctctctgccacttcctcatagattcctatccctccttttcaaccattattaacgatctctaatgaaccttgtttttcattgctcctctctctctctcc

SEQ ID NO: 1198 - DNA, 198 bp, Glycine max
ctctctgccacttcctcatagattcctatccctccttttcaaccattattaacgatctctaatgaaccttgtttttcattgctcctctctctctctccaaccccttctctctctatcattttcatttttcgtgcttccttttgcctcttccacctctcacgtaaccagaaaatctatacataacctatggctcctccc

SEQ ID NO: 1199 - DNA, 167 bp, Glycine max
tgttctgttccgttccattcataacactgctattcaaggatatttatatcaattgttgttacttgttgttcttgtcactcataagtcataagtatggttattgttttgctcaaaataaaaggagaatagttagttagttcaccggaatatgctacttctaggccgaa

SEQ ID NO: 1200 - DNA, 111 bp, Glycine max
gcctttcagaagagcaaactgtcacaagtgtatgttaattattattattttcttgttttataaagccttcatgaaccaagttataaattatctgtcaggtatttcctctga

SEQ ID NO: 1201 - DNA, 176 bp, Glycine max
aataaatgagacccaacaaaaatataattctcaataaatttaaatcaatatataatagagagagagaggccgacagagtgttaaaagtacatcatctgtttcataatgagtttttctaggttttttattacaaaaattaaaaagtgtagtaattttatgaaagatagggtgtgtgc

SEQ ID NO: 1202 - DNA, 93 bp, Glycine max
cgcctacttccatccatacatcgcacccctagtcagagtatatatatatatatatatatatatatatatatatatgtgtgtgtgtgtgcccta

SEQ ID NO: 1203 - DNA, 162 bp, Glycine max
cgcctacttccatccatacatcgcacccctagtcagagtatatatatatatatatatatatatatatatatatatgtgtgtgtgtgtgccctatatattctataattgcattgcacttatttatattattttttgcagccaatatttgaatggatcgctcac

SEQ ID NO: 1204 - DNA, 153 bp, Glycine max
tttgaaacactgaataagaaactaaattttttattattattataatgtacaaaattatctatgatttttttatattttcctatgatttttataatttatatttttttaatttctgaatcaatgtcctaataatagttgttaggcggaccctat

SEQ ID NO: 1205 - DNA, 111 bp, Glycine max
tgatcgtatgagtggtgctttaaaagcttgcattttgtgtttatatatatatatatatatatatatatatatatatatatatatataaacaaacaaataatttatcgtgaa

SEQ ID NO: 1206 - DNA, 120 bp, Glycine max
tctgttgttgcaaacttgaattgaaataaaatgacgatagtatatatgaagagagagagagaacttaaatcaacaattatcttaccaaggacaaaaagcgaagcttccatacacccgtgg

SEQ ID NO: 1207 - DNA, 94 bp, Glycine max
cttcatttatctcctgacctgttatatatatatatatatatatatatatatatatatatggatttgttattttacatcaaggagtacgtaagca

SEQ ID NO: 1208 - DNA, 303 bp, Glycine max
tctctcgaattgtttccttttcatttttttattacatttcctagactttacaaaattgggatactaaaaggttctactttaaaatagggattaaaattgtaaaatttgaaaatgtgaaaactaaatctctttattttaaaatagagagatgaaatttatgatttttagagatgaaatttatgaattttaaaaataaggagacaaaaattatatttaagtcttttactttaacaatacaattcttatttatttttttgttttgttttgttaagttgctagataattgaagggtgtatttgcttt

SEQ ID NO: 1209 - DNA, 124 bp, Glycine max
aaatggagaggcagtcttttccttagtgttaataataataattacataatcaaattaaaatatttaaataaaactaaatcacacctataatactagtgtacctaataacattgcgctacacatg

SEQ ID NO: 1210 - DNA, 104 bp, Glycine max
aattgtcgaatgcaaatgataaaattactgatgaagagcagacattgttgttgttggccttactatcaaagtccttcaaagctttggttcaaacactgcttgtg

SEQ ID NO: 1211 - DNA, 105 bp, Glycine max
gcagccttgtcaagaaacctattcattgaattgatttgcattaatttaatttaatacgcatgtacttttagtgtaaaggtttttatgcaagagctataaaccatt

SEQ ID NO: 1212 - DNA, 473 bp, Glycine max
ttaatccctggcttgacatcaagaaatgagctttatttttcgtggcaacagtatatcagacaatcagtgcttgtaatgatatatattatacgaattaaatatattttttatcttaaataaatatttaatttttagatttatttcttaataaatttttattttatattaatgtctaataaaataataattttatttttagttctttataaattaacgattttacgtttgttttctaataaattatttttatttgttaatagctgaaaataaaataaaatttattaatttattagagaataaacataaaatttggtaatttatcaaagttttaaaaaatgcaaggactaaaaaaatttttttattaaggatttaatataaaataaaaatttattagaaaataagtgtaaaaattatatttttatttagtattttaatcggccaataaaaggattttattgaatcacggtgaggta

SEQ ID NO: 1213 - DNA, 248 bp, Glycine max
tttacgggctaacttgatttaattgtattttgtgtctctcaaatattatagttgtgtaattttggtcttttatatttaaattctattatcaatatattatttatttattagtagtagaacatatttattcttgtaaaatttaatattattaatattcaataaatatataataatttatttttaattgtatttattaatagtaatattttaatattactagtatacgtttattactctctatttaccaa

SEQ ID NO: 1214 - DNA, 206 bp, Glycine max
tcgagtattgtatttgaatgattttatgcttgtactcagagttttatatatatatatatatatatatatatatatatatatatatatataattatcaagcaattaatgaatgaaaaacagaattttgtgcatcaaaaaacaatatttaacaaaataaatgtgagacttaataacaaagtatataaggagagaagacaaacgctcga

SEQ ID NO: 1215 - DNA, 106 bp, Glycine max
gacgtccgttaatttacacctataaaagaagaaaagaaaagaaggagaagacacacaaaaattccaattaggagaaacaagcaatcagagtcatctcttccctcca

SEQ ID NO: 1216 - DNA, 192 bp, Glycine max
tggtaggccaagttctcaacattatcatcttctgaattttcttctacaatattattggattttctcatcttttttatctttaattaattaaattaaattcatttttaattctttttcttgcttgatttaattttcaataatttaatttactattttctacaacctttttacctgaatacaaacaaagtctct

SEQ ID NO: 1217 - DNA, 194 bp, Glycine max
cgctacacccaacttctgtgggtacttataagtaatgaattttatttttgttatcttattttaaaaaaaaaagcattaaaattcaatacaaaatacaaaggttaaaaaaattatatatatatatatatatatatatatatatatatatatatatatatatatatatatattaaaaatgtgtgttaaaggacatg

SEQ ID NO: 1218 - DNA, 111 bp, Glycine max
tttcagctttaaactagttgatttatatgaaaaagagtatatatatatgcaaggttaaagtgaactcatttgaattgttccaatttaaggggagaattggaacacatggtg

SEQ ID NO: 1219 - DNA, 130 bp, Glycine max
tcaagccatatgcaaacatattatgcaagataactatgaaaatttagtaattttgatctccattatcactcatatctgacaacaacaacaataacaaagccttatcccactaggtgaagtcggctacatg

SEQ ID NO: 1220 - DNA, 158 bp, Glycine max
ggaaatcctaggcgtgattaaatatatatatatatatatatatatatatatatatatatatatatatatgatttacaatctttaatattaaaatactaggaaaataaagaaactaagaaattaggaaaacaatacaagtcacaccctgattatttgca

SEQ ID NO: 1221 - DNA, 177 bp, Glycine max
ccttaattcaagcaaggaaaaataaaaataaaaaataaatatatttttaaaaataaattttaaagaaaattatatatataaatatatattatttatattcactcattttttttctgttttttcaattaaaaaaatagataaaagcaaaactagagaaaggagagctagtggcaacgg

SEQ ID NO: 1222 - DNA, 101 bp, Glycine max
ggttgactggatggttgaaacaaagagaagagaaggaagagatcatgagttcaatttctcctactaatattttaacaaaattaacaaccaatatttgtcga

SEQ ID NO: 1223 - DNA, 137 bp, Glycine max
tcaacgtttgattcctgatttaacacgaatagttcaattttagaaaaaaaaattatataatatatatatatatatatattaattttgttttagcaaattgtttctttaataaattaatgttggaggaagagcgtgta

SEQ ID NO: 1224 - DNA, 128 bp, Glycine max
aaagagataatcaaatcaccatctagatgattcaaaaataaaaactttgacatatattattattattgaaataaataaataaaattaattgttaaaaatacaatatcatcttaagtcaaatttagaaa

SEQ ID NO: 1225 - DNA, 128 bp, Glycine max; identical to SEQ ID NO: 1224

SEQ ID NO: 1226 - DNA, 217 bp, Glycine max
ccaagcgttacgcataatatacattggtacgcaactctaagtcactaattaaaagaaagaacttacaacatatatatatatatatatatatatatatatatatatatatatatatatatatatatatatatatatatatatataacattattatcatggggaaattaattaacatatagttagaacttagatggggatggcattggtgactgaagga

SEQ ID NO: 1227 - DNA, 121 bp, Glycine max
accgattaccatccatgatgtagcattggcatatacagcttcttcttcttcttcttcttcttctatgctggtattgtagtttataatttgtctctgatatatctgatgcaaatgaagacca

SEQ ID NO: 1228 - DNA, 94 bp, Glycine max
catggtggtggagagaaattaatgaattgtatgttacctaagaaaaatttatatatatatatatatatatattctgattgactagtgtggtgtc

SEQ ID NO: 1229 - DNA, 153 bp, Glycine max
tcctgccatcttgctaaaccctaaaaaaatagctaatcgttgacagatgaagtctttattcatttctttttcttttcatttctaatatataatgattatgatatgatatgattaaatactaattctaattttatgttgtaagggaaatggcaa

SEQ ID NO: 1230 - DNA, 116 bp, Glycine max
cccttcatcattcttcacataccctctctctctctctctctttctcgttcatttttataccttgacttaaaggagaaaattcccaagtccctactactcagagaatggcttctcca

SEQ ID NO: 1231 - DNA, 92 bp, Glycine max
tccttgtggagacacctgtggtgagcaacttcccccaccacctccaccatctcctcctcctccctgtcaatcaccaccaccactgctaccat

SEQ ID NO: 1232 - DNA, 108 bp, Glycine max
ctcctcctccctgtcaatcaccaccaccactgctaccatcgccaccaccaccaccaccacagtctccaccacctcctaagtttccctcttgtccacagaattgcaacc

SEQ ID NO: 1233 - DNA, 96 bp, Glycine max
gtcaatcaccaccaccactgctaccatcgccaccaccaccaccaccacagtctccaccacctcctaagtttccctcttgtccacagaattgcaacc

SEQ ID NO: 1234 - DNA, 83 bp, Glycine max
tccctcttgtccacagaattgcaaccccttgccaccaccaccaccaccaagattcgtatatgtgcctgtgccaggtgtaccaa

SEQ ID NO: 1235 - DNA, 136 bp, Glycine max
accaaatcaagacgatggtaacatcaaagctagttctttcatgtttcaataagtgaaagaaggtaagggaatccattaagtaaacaacaaacaaacaagaggcaacataaattgtcctctactctgcttgtttgaa

SEQ ID NO: 1236 - DNA, 91 bp, Glycine max
ccctaaatcttatagaccaaagaaaaataaataaatagaaaaggtcattgttttctttgaaatatcataaacacaacataatcagtgaggg

SEQ ID NO: 1237 - DNA, 139 bp, Glycine max
aaagaaatgaaatggagtacagtaaaacaaaacaaaaaggggaaccattttgtcatttcacaatttaaaaacaaacggaaagttaataataacagtgaaggtcttttgagatgataaaacactcttcccatgtgtttgg

SEQ ID NO: 1238 - DNA, 98 bp, Glycine max
cggatcgatttccatacaaaggtcgtcggtcttaacggcggcggcggaatccaaaccttccgatccgaagctctccgctggatctcccatttcccgat

SEQ ID NO: 1239 - DNA, 200 bp, Glycine max
tgtggaaagttaatgggtttttttcactaaataaatacattctctcacatgaaacataaatgagtgtctcacttatagactttacaataaattaaaaatattaaaataaataattaatacatttgaaagtaaattagtattttttatagttagaaagaaagaaaaaaggtctgtactagtatttcttaatcaacgaccgt

SEQ ID NO: 1240 - DNA, 129 bp, Glycine max
ttgcagactcctgcagatttagattctgagacttaaggaaactaattatcggttctaatgcaccggcctccacaatattgattttattcctgcaagataagataagaccagttcaagtaatgaatacga

SEQ ID NO: 1241 - DNA, 125 bp, Glycine max
agcaacgtaatcgacattctagaattcacaagacaacatagtactcaccacaacacaaaattaataatagcaaaattactactattaataataataaaatcttgctaactagtttcctttagaca

SEQ ID NO: 1242 - DNA, 149 bp, Glycine max
tcttgatttggtgaactaagaaaataatattttattaatttaaaaaatattttaaagtttgttataacattaggacaattaccttagtaaaataaatatatatatatagagagagagataattgaaaaacccaaattattaggtaaaga

SEQ ID NO: 1243 - DNA, 111 bp, Glycine max
cggataagttccttccttgagcttcaagtgatttctccacaagattcatctttttttatttatttattttccttttctttgggtcctaattagtctccctcgtgttacgtc

SEQ ID NO: 1244 - DNA, 223 bp, Glycine max
ggatcgattcgtcaagattattattaaaataataaaataaaaatagaaaaattaaataataataataataataatacattgtaaaaatgtaaagaaaatatatatcctatcttaaaagttaaaattattttatgaaacacattcaataaatcatattaagtattgttgtatttttatgtcaagtaatatattaaatgtatacaatgttggagaattgctcttt

SEQ ID NO: 1245 - DNA, 256 bp, Glycine max
aaactgccctaccttatcctaaatgtctaaaacaatagaaaaccaaatcaataatataaatcgattctatatatatatagaatcgatttatgaatcatataaattgaattatatgtaatttaagtttaagttatttatttatcaaaattaactttttaactcaaatttaattactttatttatgaatcaaattcaacaaactaattatcaaatcaaatttcaaattatttttcaattgattacagagccatgcgac

SEQ ID NO: 1246 - DNA, 309 bp, Glycine max
ttgaggctccatgtcatccacttcacctattcgtattgttattttttcatgaatttgattagaatatatttatagaattatagtatatatttatttaatactattatttaattacatacatttatatattataagttttctaattttataataattattttaaaaattatatttaggataattttaattaattaattattaatgtaaacaaattttttttactaaaaatatatgaaatttttaattttcaatttatatttattataaaattctgtatggttttgttacgtaagcaaattctcgtataca

SEQ ID NO: 1247 - DNA, 89 bp, Glycine max
gacctgtgtattatgcggttaataattataatatatatatatatatatataatttaaaatacgaatataatctcaggatgaagaagaaa

SEQ ID NO: 1248 - DNA, 180 bp, Glycine max
tttaatgcatttctcaatttctttttgaaaattatatatgcatatgttaatatatatatatatatatatatatatatgtatgtatatatatatatatatacacatatatatatatatatataatttaaatttatataaatgtttgtttaaaaactattatatctttctttgattcggaca

SEQ ID NO: 1249 - DNA, 111 bp, Glycine max
catgtggtcctacccagactcaaatctaagtatattattattattattattattattattattattatttgcactttacatgcaaaagaaaatgcaaagggatagcgaatt

SEQ ID NO: 1250 - DNA, 159 bp, Glycine max
caccgttgaataagaaatcaatcatttcatataaatattatatatatatatatatatatatatatatatattaattattgtatattgatgtaactgttaaagtaaaatcttaaaacgaaaatatgacatggtagatcaacttactcgacccacagccta

SEQ ID NO: 1251 - DNA, 215 bp, Glycine max
aaggaacgtggctcctaattttcgtttagcttttaaatggctataataacatgatttcgacaaatcagataacttttaattatttttatcgactgaaaatttgtttgactatttgctaaataattttttttagtatcttttaatatttttttaaagtgctacttttatatatatatagacgaggttatgaggagaaatctaatcgcaaactcgga

SEQ ID NO: 1252 - DNA, 146 bp, Glycine max
gattgaactcacccacaaataaaaagttaaaaattaataaattcacaactaaattctacagtagtaatgatgataataatttattattattattattattattatctcccatataaaagaaagaagatcgtgatcttgctgaaaca

SEQ ID NO: 1253 - DNA, 96 bp, Glycine max
atttggttgcagaatggaagaaagtcctggtggtcgcagaaagcgagcacacccttcttcttcttcttcatctccttcaccaatctccaagaagcc

SEQ ID NO: 1254 - DNA, 108 bp, Glycine max
gagtgtttatgcccatgcatgcaaagaaaattataattacggtatatatatatatatatatatatatatatatatatatattagaaaatgtcagaacacttgactccg

SEQ ID NO: 1255 - DNA, 156 bp, Glycine max
ctgctgatttggtcctacttatcttttgtatacaaatatattattttcagttggctaaaactaaagcctaacactacctaaaattaaaatgtcctttaaatattgcaatttaaatataacgatatatatataggtaggactgtgggagtctttcgg

SEQ ID NO: 1256 - DNA, 133 bp, Glycine max
tgtaccctgaaaccgaaaaaacaaaatttaattttataaatactaacattatgaagctgataaaaaatatatatatatcattatgaagggatataccaaagaaagctaaaattctcgacatggaaagaaccag

SEQ ID NO: 1257 - DNA, 110 bp, Glycine max
cccatggtcatgtttgaatgagctttcagtgtgaattttatgcaatagtttttaaaatttaaattatgtgtgtaaggacaccacaccacacaatacgtgcaagaacacga

SEQ ID NO: 1258 - DNA, 175 bp, Glycine max
tgaataagtggaagagagtcaaaactcaataatatatatatatatatatatatatatatatatatatatatatatattaattaggttaaattataatttaagtacctctaatttttaattataatatttcaccttttttattttacaaagaaaaatgttaatcaatgccttaaga

SEQ ID NO: 1259 - DNA, 232 bp, Glycine max
ctttcctcgcgcataataatcgaagcccacgtgcatttaattatagttactaaaaataaaataaaaatccttaaaaaaataaaataaaaacttttatttcgagattagagaataatgatttttaatattttaaacatatttactaagataaataatgattttaaacatatttactatattaattaaaattaaaatataaataaaaatatttttttgaaagaaatttgccaaa

SEQ ID NO: 1260 - DNA, 232 bp, Glycine max; identical to SEQ ID NO: 1259

SEQ ID NO: 1261 - DNA, 158 bp, Glycine max
tgtggtgcatgctctatgtttaatttagtttaaattttttattttttaaaaactaatttaaaagttgaaaaaacaaataattattattattcttaaataagttaaacaatacgaacatagtgtgaaaggattattctaacttcgttagaccctggtcc

SEQ ID NO: 1262 - DNA, 148 bp, Glycine max
cccttaccaatccaatcccatatcctaataattataattttccttacaatatttattattattattattatttattaaataaaattattaaatatttataatttttatggcattaattagatatatttattggaagaggtcaatcagg

SEQ ID NO: 1263 - DNA, 160 bp, Glycine max
tggagtcgttggagaagagcatatcccctgtggctcacagcttgatcaggtttagctatggtgaaattatgtctgctactaggaatttctccaaaggtaagctttttttttccctcttttcttttcttctttcttttgtggttaatagtgactttagtcc

SEQ ID NO: 1264 - DNA, 219 bp, Glycine max
tgtgcattaaatatacattagaaattaatgcactaaaattaattgtcacaaaattgattatgtaaatttatatgtgcattatatatatattagaaaatttattgttatatatgacaacattaattattttataacataattgatctattaagtcaattggttagaatattttgtttaaagtcacatattcgaattctacatgagccaataggtgacaaa

SEQ ID NO: 1265 - DNA, 149 bp, Glycine max
gcacaaaggactgcaaagaaatagatgagacaggtttcaaaacataattattaattatcaagaatacgatataactagcagcatttaataaaaacaacctggattgatgttatagtcaacaacaacaacaaaaactgtccggtattgtt

SEQ ID NO: 1266 - DNA, 325 bp, Glycine max
ccatccgtagtaatatgtgctaaataaataaataaagagtttcattttaatatactatttttattccagatatgaattttgatataattatcataaataaaataattatacatgatcatctataattgaattattgtgaaagatatttatattattagtacattctaattaaatttataaatagattttttttaatgcttgtttaaaataatttattttaaatatattctttttaacttttattttaacgaagattttagaaagaatgaaatattatactattaagccattatcaatagcattctttatacgacaagcaaagcca

SEQ ID NO: 1267 - DNA, 97 bp, Glycine max
tgatgaatgcaacgagtggcttgtggggtaagtggatgatgatgatgatgctgggaatgagagggtgtttgaggatgaaaatgatgatggccttcct

SEQ ID NO: 1268 - DNA, 101 bp, Glycine max
ccaataattgtccaataactcaaactcaataataataatcataaagggtgagggcttgaggtcgagggtcttgagagagagggaggtcgtgagggattgag

SEQ ID NO: 1269 - DNA, 87 bp, Glycine max
ggcttgcaggctaaatggggcaggcctaaacgatttacggatctcaaatttcaacccaacccaacttttttggagaactagtcgggc

SEQ ID NO: 1270 - DNA, 205 bp, Glycine max
ggaagaggcagaggagaatgaacgtattttatcttgaacaaattacttttgaaataatattttgttaatgtttgtccaacttatttttatacatatttaattggtatatatatatatatatatatatatatatatatatatatatatatatatatatatatatatatatatatatgataactgttaaataattgttctttgatga

SEQ ID NO: 1271 - DNA, 110 bp, Glycine max
cccaaagactcaaagctctacaatgaatacatcttaagcctgagtatctctagtatgggaaatcatttactctctttctttctttcacccctcttattccatcaattctt

SEQ ID NO: 1272 - DNA, 143 bp, Glycine max
tgtggattcgacacttgaactttcaagtactttattacttgtgacaactttagtgcactttaccaacaagttaacaatatatatatatatatatatatatatatatatatataattctattttaattgctatgcgacttgcta

SEQ ID NO: 1273 - DNA, 144 bp, Glycine max
ccctctctcctatccttctttctctatttatatctaataaatccctctaactaactaactaactcattagtagtttaactatattaactaactcttccttctccttatatcctaacacaaatagtagacgggtagaaaccttgt

SEQ ID NO: 1274 - DNA, 146 bp, Glycine max
ttccaaaccattcaggtgtgatctgaaccaacttcactgcacaacacaactacacaagagggtttcaactatctactcctcttcttcacactctctgtgtgtaagtgcttacattacattacaatttcactcttcaactgttctgg

SEQ ID NO: 1275 - DNA, 107 bp, Glycine max
gcatgtgtgatccttcctattggttatgcagtgagtgtccactacacttaacacaacaataaaactaataataataacgagtttttaacagcagccattaaagggaa

SEQ ID NO: 1276 - DNA, 107 bp, Glycine max
gcagccattaaagggaatttatcaaccttaatccctttggggtccaagagtgtgccacacacacacatttctgcagagaaaaaataacaaaatgtgtcctctgcgat

SEQ ID NO: 1277 - DNA, 208 bp, Glycine max
ttgcctctgggattgtaatttttggggtcagtttagatgttatgtatcatatagatgttgttcatagtgttgttgttgttggttttgaatggtgaaaagtgctataactgcaaaaataatgataatgatgaaaatgaagcttattttcttgatatatcatcacgtgaagtgttgtctttttttaactgcttctgttctggattgctgg

SEQ ID NO: 1278 - DNA, 137 bp, Glycine max
tgctgggttgtttcttgttttcatgtaaacttgttaatttcaatatgggttttccatgagatgcttgtatgttttcgggttcaagtgtatatatatatatatatatatacagcttcatagcatggtgtcaacagagg

SEQ ID NO: 1279 - DNA, 185 bp, Glycine max
aacgacaatgaagtttgaattttttttaagtatgatttttaccattagtcattttaataacgtagtacaacaaattgtataataataataataataataataataataatagtttacatagttaatacattaaaatcaaataaaataacttcaacaaaaactaatcattatttccgattaaggtt

SEQ ID NO: 1280 - DNA, 114 bp, Glycine max
gcgtgaccttatgcaatctcatctcatagacaaacatatctaccagtctcgactcaacggtcatatttcattagagagagagagagagagagatgcggaagagaaagggtgcat

SEQ ID NO: 1281 - DNA, 97 bp, Glycine max
acctcttgacatccctcagcccccgctacaaaggccacacttatatcgggttcctctctcatctcatctctcttattttcacttctcaaagatccaa

SEQ ID NO: 1282 - DNA, 178 bp, Glycine max
ccttacaattggattctgatgaaaactaatgtaataacttcttaatcatcgaggatttcttttcttttctttttttatcagtcaatattagttagtttttatttaagaaaaatctttaaaagactaaaatggctacacaggacaactcaatgtttagaagaccaaaccaagagttgca

SEQ ID NO: 1283 - DNA, 111 bp, Glycine max
ccaagaaacagatgtgtgcgtttgtgtgtgtgtgttttgcatctgtgtgtatatatttatatattgcacattataaagtaaagatttcaaatcaggattaggaaaccaaag

SEQ ID NO: 1284 - DNA, 100 bp, Glycine max
tcaggattaggaaaccaaagtgaattgattggtaatttaattatttattataattattattgttattattattattatttgattgtggcagcatgtattg

SEQ ID NO: 1285 - DNA, 118 bp, Glycine max
cgcatcaccaatgagattattgtataactcaggaaaaagaaaagaaaagaaagatacaaataccatatcaaatactatggtattgttttgatggaagaaacacacacaccgtgactca

SEQ ID NO: 1286 - DNA, 284 bp, Glycine max
tcttgatccttgcccttaagattctttatgaatatatatgagaaaaaaataaaataaaaaataaaaaatactaataaagaaaatgtataaagaatgaatttttgaattaatatttacttaaaaaatttctactaataaattatgtctttaatttatcaataaaataaataataaatattattttgatttattatttaataaataattatttattagaagttagatatttaaataattgtgaaaaaaaaattgactcccatttgataaactccaggatccgtacc

SEQ ID NO: 1287 - DNA, 119 bp, Glycine max
tctggaagacacgttcaaattttaggtatatctttatctttctttcttttttttggtaaaaaaaattctaaatatattagcatatatcttcaaaatatcccaagtctacctgtcgcggt

SEQ ID NO: 1288 - DNA, 214 bp, Glycine max
cattcaatgcctttgtcccctgtaaataagaaatggattcttgcatctcagaatatactacctatttaattaatattataatactttgagatataatggagtaattgacaatttggaacaaaaatgataataataataaaagaaagcatatattactctaagaatagttttcacgtgtctgaacaaattagctagctctgcgaacaataatgga

SEQ ID NO: 1289 - DNA, 115 bp, Glycine max
caatgaagcaagagtgcattcagattcacaaattattggtttgaatcatacatataaatctactactactactactacaaagagatataaacagcaatgaagggtcgtgactttg

SEQ ID NO: 1290 - DNA, 95 bp, Glycine max
gagggtgagccatgagaccgagttgatagaagaagaagaatggaatgttcttttaaagcttcgatttggagcatttttattaccctgcctcgttt

SEQ ID NO: 1291 - DNA, 166 bp, Glycine max
aagctgagtggatagaatcaatagatgaatagataactttacaccaaataaataaataaacaaaatgaatagatctctaactatttttcgtgtgattattaactttattatagttattacaaatatactaaaactatatatcacttatgtatgaacgtctcattcc

SEQ ID NO: 1292 - DNA, 104 bp, Glycine max
tccagcaagagaagttgggattcaacaaaataataataataaaaaaactcgaacagaagagaagacggagtctctaaaatttcccaattcattgagcaccttgc

SEQ ID NO: 1293 - DNA, 77 bp, Glycine max
acgtgttgtcatttgatacgttccctatacgcacatgtatgtatgtatgccttatttttctttggtttgtgcctttg

SEQ ID NO: 1294 - DNA, 113 bp, Glycine max
tttgtattgtttctacatgcaacttattattgctgctgttgttgttgttattattatatgcaggtgttatggagatatcattgttaaaaatgatcgtaaatggaatgtcctca

SEQ ID NO: 1295 - DNA, 239 bp, Glycine max
cactgaagcaacattatcaaagaaaaacaaaatattagttaatatgagaaatttaacagtattagtctcaaacaattgagttgtaaaatgttaaaattacaaagactgttaacactttttaaactataacgacttgatcaaaacatgaataaaattaacatttttactattcaaataaataaataaaaacaaaattttaattctgtcttaagatttcaaaatgttcttgggtcaaatcc

SEQ ID NO: 1296 - DNA, 210 bp, Glycine max
agaagcttatccaaataggactataattttgaatgaatttaggatactatgttttgatttgagaaaatattattattattattttatgttttaataaatcataataaaattgctattttattttattaattttctgttcataaaattttgaattgaaaaatgttttttttttcactttttttttacaaactttgaaagcaagaaatattt

SEQ ID NO: 1297 - DNA, 210 bp, Glycine max; identical to SEQ ID NO: 1296

SEQ ID NO: 1298 - DNA, 95 bp, Glycine max
attgtagggtccgcatccgtgttgcctagctgctaggaaagaacatgcatgcatgccaatgttgatgactagtaaaattaactaaaggttgcaaa

SEQ ID NO: 1299 - DNA, 79 bp, Glycine max
gaccatgcctgttgtttcacttcttccgttttatttatttattcttaatttaggaactctggcatgtggcgtgaaatat

SEQ ID NO: 1300 - DNA, 208 bp, Glycine max
tggttggctagcttgttctcttttggtttataatattccaacttttacacaatatagatactgtccgcaactattttttctttctttctgaatccaaaactactaaaataataaatataaacatttattttttcaaaactttttttttttataagaaaaattttattaatttttttgttttagtttagggtggagagtcctaattccg

SEQ ID NO: 1301 - DNA, 73 bp, Glycine max
tcaaaggaaacgtgttggatatttcttttacaatagtgatttgatttgatttgtaatcggagaggaagatgaa

SEQ ID NO: 1302 - DNA, 199 bp, Glycine max
tttcctgttggtctttgaatcagaggggatagatctaaaattttcttatgtcaattacttagatgtattctaagagttgacatatatagtagtgcaaatgaaaacaatatagctattaccaactgatttttctaagttctaatagtcatgcgtgcggccgtggatattagttagttagtccaaattgatcttgtctcct

SEQ ID NO: 1303 - DNA, 134 bp, Glycine max
tttcagtgaggctggctataagcttttttccttaatttgtaatgatggtaccaatttatataataataataataataataataataataataataataataataataataatgtcaaaacttcttggcaaagcc

SEQ ID NO: 1304 - DNA, 124 bp, Glycine max
ttggagcttgagtgcttcactgcacttcactcacacacacgaagatgaagagagagagagagagtttgttacaactgaataacagaaaaatgaatcagtgtgcaccacttgcagcatcaccatt

SEQ ID NO: 1305 - DNA, 124 bp, Glycine max; identical to SEQ ID NO: 1304

SEQ ID NO: 1306 - DNA, 119 bp, Glycine max
aatgtaagtcctcctctctttctatatatatctatgcaatattactaattcactatgcatttatatgaaaatatatatataaaatctcttgactttatttagtttctagccgacgtgtg

SEQ ID NO: 1307 - DNA, 183 bp, Glycine max
aggccgattaagtttagaaaatgaatatttatcatatgaatatatatatatatatatatatatatacacactacaaatattattgtagtaatgtttaaataaattaacctgtttaatccaaaagacttaatcaaaatcttaaaacttgacgtatttaattgttttgactttctatttgtccca

SEQ ID NO: 1308 - DNA, 123 bp, Glycine max
tgaatggttgtttatgtatcattacatataaatcataattaaattaaatttcaattttcactgatcaatatacggttaaacctgaattattgtcaacctcaattacgtgttgcaaagtgatga

SEQ ID NO: 1309 - DNA, 103 bp, Glycine max
cgtgttgcaaagtgatgaaatcatgtccatcataaaataaaataatctaaacacccatcaattaagaattaacggaaacatgcatcaacaggcacaggaacat

SEQ ID NO: 1310 - DNA, 116 bp, Glycine max
agacgcaactgcagaagagttaattaattaatgctgttgggatggaccacaataaagattgaaaaattaagagattaagagtattattattatatgtcaagtgaatcaagccatgc

SEQ ID NO: 1311 - DNA, 101 bp, Glycine max
ttaatgctgttgggatggaccacaataaagattgaaaaattaagagattaagagtattattattatatgtcaagtgaatcaagccatgcttgccatgtatt

SEQ ID NO: 1312 - DNA, 256 bp, Glycine max
tgtttgcaacacacgttccactctcttattgcataaagtttattgaaagtgaaaaaaattgtgataccacatcatatttaatattttatcttgattaattttgtaatttttattaaattttaacctattaaaaagaatgtatttaaagaattaatgtgttagagaatatattccaaacactcccctaaatataattttagaaaagaactttatatatatatatatatatatcttcaaatggtaatcttgtccagcc

SEQ ID NO: 1313 - DNA, 271 bp, Glycine max
gctcgtgattctgtgtccatagtaagtgtcatactaatcttaattttattctcacacttcacgaaaaaattgtgtttcacttctctttagcatgtatatatatatatatatatatatatatatatatatatatatatatatatatatatatatatatatatatatatatatatataaaagaaaggtgttttaaaaaaagaagtggtgtaaaaaaataaggaaaaatgatagatatacattacattttttaggtgaaagaaagagagaaaca

SEQ ID NO: 1314 - DNA, 160 bp, Glycine max
attggcaatgcatgtgatataatgataaagaaagaaatacatagaaaaataaaataaaataaagtagaagaaattaactgtatgaatattattgatgaaaaaaataaatccaccttcaaaaagtaacgagtgtggttttctgtaacagttgggaggctca

SEQ ID NO: 1315 - DNA, 407 bp, Glycine max
agcagagaaccatgctcaaagtatatgacagaaaccttgatacggaatcaaatctttattagtgtgttttggttttcgtttagactttagactaactttcaagtaatgtaaattaaaaaacaataactaattattttagctctttttcaatagaaaatcaaatacattctactgtatgtcttaattttagtctctccattaaaagtaacatatcattagaaaaaacaactgagaaaacaaatgttatatttaaaaagaaaaaaattattagaatttcttttgaagaaattatatatatatatatatatatatatatatagataaagaaataagtgattttaaatttttaatcccttaattaggacaactttgaaattttttgttaggccaacgaattagcctatcac

SEQ ID NO: 1316 - DNA, 202 bp, Glycine max
tcatcttgaatccgtggtggaaaaatgatattgtgtttcgaagtgactaggctgtaatggtgatactaagaggaaagtcgtcttaaaaaaagaaagaaagaaagaaaagtcttcgcctggcctgcaaaaaaaaatatgactttcaagttaatttttgtcttcaacaaaagcaaattatatattaaaacggtaccagccagtg

SEQ ID NO: 1317 - DNA, 138 bp, Glycine max
ttgtttcatgtgctgtcaattaaatttgttttgttactaatattttattatttaatttaaaactctgcatcttcttcttatttatttctttcatttttattttatttttctaacgtgagagaagtggctttgttggtg

SEQ ID NO: 1318 - DNA, 118 bp, Glycine max
tcattgaaggcgacatctctttgtacaagggttctggtatatatatatatatacttatatgctgataaaaaaatgtctttcaagttagttaataaagtgcaaagaatagaagtgaaca

SEQ ID NO: 1319 - DNA, 161 bp, Glycine max
tcaccacaatcaccatcactgttattatcatcgtcattttcacaaatattatatatatatatatatatatatatatattaataaataaatacattttaaaattataatatatataagaatataaaatataaaattaataccccaatttgggcacgagacac

SEQ ID NO: 1320 - DNA, 155 bp, Glycine max
ggtatttgaaaccgaaacaaaaaattgaacattgatataaatttcttttgtttatattaacaaattaatttttaattaaatataatgacatttaaaagatataagttgaaccgaatgattaagaaagaaagaaaaggtggtgtatttgatctctt

SEQ ID NO: 1321 - DNA, 113 bp, Glycine max
ttgccctgttgtatgagctcctatatatatatatatatatacatacatacatgtacacaaattttaagataagaaaaaaaaataccattaggttgcactagatccacatgcga

SEQ ID NO: 1322 - DNA, 105 bp, Glycine max
tcaagatgtcgattaatgtttctattctaaatattactagacatttttccattttaaagacagtatatgtatgtgtgtgtgtgtgttggtgagttcgtttatgct

SEQ ID NO: 1323 - DNA, 98 bp, Glycine max
gaccatgatgatggaagaatatacttagcaatatatatatatatatatatatcacagtagcatattcaatgtttcatgtgaggtccaccatttgtcct

SEQ ID NO: 1324 - DNA, 197 bp, Glycine max
agggaccaaattacaaagcttacaatattaattaaatttgatggaaaaagcaacattgcattaatttaaaaaattaaggaaccaaattaaattttttaataataataaaggaaacatattgaactagctaagacaaaaaaaatataatttaaccctttttattttgataaagatcaatatgatttgcattgatcaaa

SEQ ID NO: 1325 - DNA, 178 bp, Glycine max
cgagttgttctgcatcaatatctgacaattttttacttagttaaggaatcaaaatcagataaatagttaactacttgttgtagttgctacagaatgcatttgttttgttttgataacaattttagagaaataccatattcagaataaaatctaacgtttcagcagaataccgcagaag

SEQ ID NO: 1326 - DNA, 105 bp, Glycine max
gcttgctcacaccatacctacaaaattaaccattgcaagagcatcgaaagaatcagattcataaaataaaataaaataaaaaacacacaactctctcgacaatca

SEQ ID NO: 1327 - DNA, 145 bp, Glycine max
gcaagagcatcgaaagaatcagattcataaaataaaataaaataaaaaacacacaactctctcgacaatcaacttaaataaataaacaattgattaattaattaacgccaattagtcattggtaattgaccaacaccgtaccaac

SEQ ID NO: 1328 - DNA, 329 bp, Glycine max
ggccttaattgagctcctaaggcccaaactataataattaaaaaatgaggtttttagaaagaaaagaaaatgtatttaggaaattggagtaatcattagagaatatttagtatcacattttttggtacataaacttactatcttatgctccactaaaaaatgtgatgggtaccaaaaaaacaatgttcccctaaaataatgtatttatagtcattaatattaagtaggaagttaaaaataaaataaaatataaatttaattataattttaatgtttatttttttaattaattttacattttaaagcagttaaatcccaactccatttgc

SEQ ID NO: 1329 - DNA, 96 bp, Glycine max
aactcggcattgaataacatatatatctatatgcatgcatacacacacacacatgtaaatgtaatatgtgttttgtactgatgttatatgtttaca

SEQ ID NO: 1330 - DNA, 248 bp, Glycine max
tgcatgcatacacacacacacatgtaaatgtaatatgtgttttgtactgatgttatatgtttacaatatatattttttgttatgataatttttaatatatgcttcattttttttataaattttatagaaacatatgttagtagataagtatatataaatattttaatatatatatatatatatatatatatatatatatatatagttatgaatattaatatatattcaaataattcaatattcacaca

SEQ ID NO: 1331 - DNA, 167 bp, Glycine max
cgaataggattcagccatacatatataagggaaaggactatctactaaaagagtcgtgtaaaattttaatttaatttataaaatatgtcaactataaatatatatatatatatatatatatatatataatacaatattttgtcaaaaaaaaattcctcggtccctaa

SEQ ID NO: 1332 - DNA, 167 bp, Glycine max; identical to SEQ ID NO: 1331

SEQ ID NO: 1333 - DNA, 86 bp, Glycine max
aacacggaatacgttccatatctatatatatatatatatatatatatatatatatatatatcaaagtgatcttcaattgttgaaca

SEQ ID NO: 1334 - DNA, 128 bp, Glycine max
tgaaccctggaaaccatattctctctctctctcttgatttatcacactagtactctctctctcacaagaactatgtgcaaagaaatgtaaacattatttgatggtatataaagagagggtgagaacgc

SEQ ID NO: 1335 - DNA, 128 bp, Glycine max; identical to SEQ ID NO: 1334

SEQ ID NO: 1336 - DNA, 98 bp, Glycine max
catttaaccatccaatccattttcccttttgaacctgtaacctcctctcctctccttctcatttcaccctaaaattccactttccaactattaagtca

SEQ ID NO: 1337 - DNA, 90 bp, Glycine max
tgcatgggaacgtgtaaaactgatgaaataaaagaggtggtggtggtggcatttgcagcatagtggggtagggctatgttgaggaaggaa

SEQ ID NO: 1338 - DNA, 108 bp, Glycine max
ccgtgatactagttcttgagttgataatatatatatatatatatatatatatatatatataattttggaaatctttcaatactagtctcttcaaaggttgattacgca

SEQ ID NO: 1339 - DNA, 325 bp, Glycine max
catgccatcgtttcatcttatagtgaagagttttagggatacgtcagagaagagagaaatgagtttcttttaaagaattaagtgataaattagtttaatatccttaaagtaaatgagaattggtttttttttgtttatatattttgatgtaggatattaacatactcaattaaaaaaaaatatgagtacattaccaatcttttatatatatatatatatgaaagatgatccacttcaagagtaattttattctcaatctgaatcttctattttgtattaaattaatgacttacattgaataacttacactcctcacgtgacattt

SEQ ID NO: 1340 - DNA, 133 bp, Glycine max
tggatcgaacaagtaagtgagagattaattggatgtgaaataaaaaattaaaaaacaacaacaacccttcctttcttttaatctcttctctctgaaccccagggaattttacttaatttcatacgctggcaga

SEQ ID NO: 1341 - DNA, 269 bp, Glycine max
ttcacagcatgccaaatactatatgagaaaattatatatattacttcgtgtgaattataagaaaaaaaaatatttcatattatttaaaaaaatgttattttcaattaaaaagtaaatatttattctaaactattattcattgaaacttaatactatcaaacataaaaaataatctttgatcttattaaatgaagaatattttaaataaaatctcattaaataaaatatacatacaacaacaacaacaacgtcttatcccactaggtggg

SEQ ID NO: 1342 - DNA, 106 bp, Glycine max
ctgaaactgtgaagtgagcaaattaagctttgtcggtttttaattaattaattattagtccattcactgttttgtgaacaatacacctggactcaccatacgctga

SEQ ID NO: 1343 - DNA, 70 bp, Glycine max
aatgccatggataaacaccttcttatattatatatatatatatacacatgaggagagattaaattatata

SEQ ID NO: 1344 - DNA, 293 bp, Glycine max
atgggcttgacccattaaaaaatccacctcattaataatgtaatttatgtaaaaagcatatatcatatgagaataattatcttatgtgagaatgagaataattaatctcaatcgttaaattaaaatgaaacatcaaaattaaaatattttaaatttaaattaaaacttcatctaatcataaaattttcacaatatttaccaaataaaaaatcaaatatattaaaaatttaatttaattaagtcaagatcatatcataatcaccatgacaactgtaatcatcgtcatcatcacg

SEQ ID NO: 1345 - DNA, 98 bp, Glycine max
atcacgtcaccatcaccttggtggtggtggcggtggcaaatgcctgatcataggcaaatccccacaaaacaattgagccaaaagcaatcaccaccgac

SEQ ID NO: 1346 - DNA, 99 bp, Glycine max
ttgcatgtggtttgatcttctatccttgtttgtttgttttgctttcataactatgtacgagtagtctttttttctgttcggattgggcattagccttgt

SEQ ID NO: 1347 - DNA, 229 bp, Glycine max
tcacgttacattatcacatcaaaataatatatttaatcaaatttaataaaatattatctaataaattttaaatttatctaataaaataatataacctaactatatctaataaattgatctcataattatcttttattagaatatatatatatatatatatatatatatatatatatatatatatatatatatatatattatttgtatctatgaaatctgtctgtcagcc

SEQ ID NO: 1348 - DNA, 120 bp, Glycine max
gctcaaactctattgttgtcgtcatataaaataaataaataaaatcccttcaccactagttcagcaaataaaaaagtaacgaaaacctcacttagaaaagcaggacatgaatgggaatga

SEQ ID NO: 1349 - DNA, 197 bp, Glycine max
gcgtgcagataaaccaaaaataattgaggacaaatagtagccaaattaaattaaattgttcgaaatttgatatttcattaaaataattcttaacaatgttttaattataatttaagtagtgtcttagtgtctatttcatttagttagggtaagcatatgtatacaaaatattatcatatatggcctgctatttgtga

SEQ ID NO: 1350 - DNA, 116 bp, Glycine max
ccatggatactccacctgcctcgcctcctcctcctcttcctcctcctcctgcagacgctgatgcgtctccatctacgttgaagcggacacgcaaggcgacacggctacgatcattg

SEQ ID NO: 1351 - DNA, 120 bp, Glycine max
ggatgctaatttccatcaagtgaactttaattttctaaagataaataagaggttttcttatatatatatataaattaaaaaaaagaaaccttacgtttagtgagacgaatgagtggaacc

SEQ ID NO: 1352 - DNA, 77 bp, Glycine max
tgcaatcccaatttgtcttagagataaatctaatctaaagtaaataaataaataaatccattatccaatgtcttgaa

SEQ ID NO: 1353 - DNA, 233 bp, Glycine max
caacactgccctgctatcattttcttaaactcctcatcacaatatgaaatcatgaaagcataatgctaacaaaattgtaacttaagttttcacttgatacgcttgatatatatatatatatatatatatatatatatattaattttatcacacaatagattgttttactttacattcttatctttcttgacacacatcttatatacattttgtatagagccaaatgagagcat

SEQ ID NO: 1354 - DNA, 100 bp, Glycine max
gccaaatgagagcatgagatgagtaaaccctgatccttcaattatatatatattatcaagattagttctcttatactatagtctcttacacgcatgcaca

SEQ ID NO: 1355 - DNA, 98 bp, Glycine max
caggaggactagaattgcatttaagcctaatgattaaatactaaaaacaataaatatatatacatatatatatttcttttgctcatttattactgaaa

SEQ ID NO: 1356 - DNA, 114 bp, Glycine max
cctggtcgtcgaagagtgcgacggcggcggcggcggtgggttttttgggatcgggtttgaaaggtggtgtgggctttgggggcctagaagagtggccgagagatgagaacgtgg

SEQ ID NO: 1357 - DNA, 117 bp, Glycine max
aaatcatcaatgacctaaattgatgtttgaaaagttagctcaaataaataaataaaaactaaagtaactcacatttataattattaaaatattttatctttataagttcgatagagt

SEQ ID NO: 1358 - DNA, 131 bp, Glycine max
ttgtccactatcccgatgattttattttattttattttttcaatttttggatcatagttcctacttttatcaaataaatacttgatttttttcagcatttattgcacaaaatgttggattgttgggaggta

SEQ ID NO: 1359 - DNA, 107 bp, Glycine max
tccaagcatggttgtaggtgataggaattgtcgccatttgattattaattagctgaatgaagaagcaaaacagagagagagaaccataaaaatggagaagagtcgcc

SEQ ID NO: 1360 - DNA, 104 bp, Glycine max
tcatttcagttccgtagcattttactctgcagcagcagcagccaccacccatggcgtcgttttctgccgccgtcgctcagttctcccgtgtttcacccactctc

SEQ ID NO: 1361 - DNA, 100 bp, Glycine max
ttgcttatgtcttggacactattgtatgacaataataataatatatggtactttttggtcattaatgtcacatgacagatcagatgtatttcatggaaga

SEQ ID NO: 1362 - DNA, 175 bp, Glycine max
tttggtgccaatacacaatttttgttgagcaaatgtcctaattttaaattttaaatgtagaaataaataaatatattggtaagtatttttttatttattgtgaaatacatatttagttgaccccactctagaaaatgtttggttgttgttgtaactaattggaaggcttgcttgt

SEQ ID NO: 1363 - DNA, 96 bp, Glycine max
ggaggaatgagaggttggagagggaagggagggtgccggagagagaattgtcttggagagagagagtgcggagttgagagagggaattgagatccg

SEQ ID NO: 1364 - DNA, 114 bp, Glycine max
ctccaacgatatcgaacacatatatatatatacctagaggggagaccccaggtacattttattcatcccaattatagatacataaacatctcatagcatagcaccactgacttg

SEQ ID NO: 1365 - DNA, 133 bp, Glycine max
agtgacttaagcacaaattaaaaataaacaacaacaacaaaaaagataagagatcatgagattaaaaaactaggctacttacttaccctataaaaatcaaaagtaaaactgaaaaattgggctagtgtgctca

SEQ ID NO: 1366 - DNA, 157 bp, Glycine max
ggttgacctgattattgagaaagaaaaattaatagatgaaaggagaagaaaaaaatcatagacttaaatttattttactaatattttaacaaaaaaaaataattaacattgaccgataataaaaatatatatataatagttctcaagggatcattgg

SEQ ID NO: 1367 - DNA, 109 bp, Glycine max
aggctccaagtctccaacacaattgttagccatacgtacgctttactccacaaaggccattaagggattcattgattgattgacctttttctttcctgttcatctttca

SEQ ID NO: 1368 - DNA, 226 bp, Glycine max
aaatataatcccttcattcattttcaattttcggatttgtttaatatttttatttttatttatatgttattttaaaagtttaaaataacattaattattcttttatcaattatattcatacatttcacttattttttaattaatttacatatgcaaaaataaataaataaataaaataagaaatttcataattattttttaggatcaagaaagtatattatattcc

SEQ ID NO: 1369 - DNA, 375 bp, Glycine max
tcaattatattcatacatttcacttattttttaattaatttacatatgcaaaaataaataaataaataaaataagaaatttcataattattttttaggatcaagaaagtatattatattcctaaatatactatttgtttaaattttaaaatatcattttaaaataaacatttttatgtaagtattttctaaaaagtatataggatttaatttttaaaataagcagaaaactatatatatatatatatatatatatatatatatatataatttaaagaaacacactaaaaaataaaaagttactaattttattaaaataaacatttatttccatattcttgtattaaattaattgttacctccgattcaagaatca

SEQ ID NO: 1370 - DNA, 170 bp, Glycine max
ccaccacttatgcctagcttcacatatcaaatacacaaacataataaattaataagatcattctatttgacctacttagatggaaattgaacataataatgaatgaatgaatggatgttgttaattacatgcaagatcagaagctttggaggcacgatcacgtacaagca

SEQ ID NO: 1371 - DNA, 106 bp, Glycine max
tcccttccaattcctctctaaaacacagctcctcctcctcctccttctcttcctctttcactctaatcacccacaagaacggaaaactacaacctaacaacgcacg

SEQ ID NO: 1372 - DNA, 158 bp, Glycine max
attcccgaatggtaacaaatatatatatatatattacaattttttatagtatatttaactttttatttcacaactattgttctttaaattacatgagaatggatagaaaaatagagataatgaagttatatatgcatttaatgtgggcaaagatcatc

SEQ ID NO: 1373 - DNA, 134 bp, Glycine max
aacatggtgcgtgatattgtacttgcagattaatgaattaaaattattgattttatgttcggaatagacagaggagaaaactattgaggtgggtggaagaagaagaagaaaaggtagtgggaagtgagaaggag

SEQ ID NO: 1374 - DNA, 112 bp, Glycine max
ttgaataccatgaacgatgattcatgtaagtattgcttcttattcttgtggaagatactcgtttagtttagtttatctttcaatttttttgttggtcacggctgctgtagtt

SEQ ID NO: 1375 - DNA, 182 bp, Glycine max
agcttggacaaatgtgaaatttgacgtgggattttggtatttttaacattaaccattcataagatctaatgattattcattcttcttactcacgtaaaaaagacttacttatatatatatatatatatatatatatatatatatatatatatatatatatcttttttaattccaaccacggt

SEQ ID NO: 1376 - DNA, 160 bp, Glycine max
gaattcctcgtataaccaacaattacttttattacattttagatatttttaggggtctgattctctctctcttcaagaagagggatatttaagtacaatcattgacacaataattatagatacaaacaaaattgttagactgattatgtttggccaaggg

SEQ ID NO: 1377 - DNA, 133 bp, Glycine max
tttatctactttcttccggttttgaatagtaataaaaaaattaatttacgttaattgagaaaatatgttaatattatttattttaattaattatatttaataaataaataaattttccgaactgtcctttatt

SEQ ID NO: 1378 - DNA, 316 bp, Glycine max
tgtttgaaggatcatttcattaaatagagtaaaattaattaaaatttatttatactgtggacaatttttttatattcaaaattaggggagtaacatttagatactacaacatgtttttaataatattattattttatttctttggattactttaattattttattttatgcttttccgcctttttgtctctttttattttaaaaatcatatgcagtaatttttattataaaagttatacaagtacaatttttttctctttatctttttcgataatattaattaagaagctattcacccctgatttaagtggcttaa

SEQ ID NO: 1379 - DNA, 102 bp, Glycine max
tgtctgcatccatttgtcttaccctaagattaaggttcttttttctctctttatttatttatttatttgtttgtttttttttgtccaacgatattgggcgct

SEQ ID NO: 1380 - DNA, 152 bp, Glycine max
tgtctttgggtccatcttattaatacctttatttaattgataaatgtctacatgcttggttatatatatatatatatatatatatatatatatatatatatatatatatatatatatatatatatataatgtacgaatggaactattgcaaa

SEQ ID NO: 1381 - DNA, 102 bp, Glycine max
tgtgagggagtgtgttcaaaagaggggtatatatatatatatataagtgtgtgaaaaagagagaaatggaggtggggatttgagtatgggactatggtggga

SEQ ID NO: 1382 - DNA, 122 bp, Glycine max
cgaagagtatggcaatgaatgatcacttcatcactaaagtaccgataagtgttacaaattatagttattattattattattattattattattattattattcaggaaatgcagaaactaga

SEQ ID NO: 1383 - DNA, 101 bp, Glycine max
aattggttggtcacgatgctattgatggttgagatattgtcacatatatgatatataggtccattaattaattaaaactacttattcctcatcaaatggca

SEQ ID NO: 1384 - DNA, 150 bp, Glycine max
acaaattgagccatagtttcaacttttatccgtgatctacaaaccaaaccaaaagcaactactgttgctgtatttgaaaatttgagctaacagtctcaccataatgaaaaatggtttgaatggtagtttcccatatgactgcaggttgcg

SEQ ID NO: 1385 - DNA, 187 bp, Glycine max
gccgaaatcagttatacccaacgaaaaagctaaaatttgagatgagatgagaccattcatgaaaacaagagaacataatacaagtaaaaagtattttaatttttaatctaaaattaagttatggagaataaattttaaaataataagagaaaagatgaaaaagaaaacaggtctagaattcagcttc

SEQ ID NO: 1386 - DNA, 213 bp, Glycine max
aggacgctcaaactttgtttcttttcttttgtctcttgatttggtgattaataaaactcatttttttttaatttaaaagaattaaaacaactaccttaaaaaacaacaacaacaacaactcatcaagagaaatgtttattggatcttttatttcaacacaaactcttcttttctcaagtagaagtcagtagaatctaagacctttgcaaaccg

SEQ ID NO: 1387 - DNA, 83 bp, Glycine max
tgagaagttgaatgctcaaataaaaaaccatgcatgcatgcatgcatgctaattgttattattatttctgggtacatgcatgc

SEQ ID NO: 1388 - DNA, 169 bp, Glycine max
tggaggtaactatcaccctaatactttgtttcaattagaaatgaaatacacaagaaagaaagaaatagaaaagaataaaaataaaagagaaatagaataaaaatgttttttgaatgaataaaaaataggaaagaaagaagtaaagaaatttctcttcacttgtttggaa

SEQ ID NO: 1389 - DNA, 78 bp, Glycine max
caaatgctttgttctttcgcaaggaaagtatcttgtttttttgtttttgttttgttttctgtcccttgaaatatctca

SEQ ID NO: 1390 - DNA, 77 bp, Glycine max
tctctgcagcttctctgcttatcttactctaacacacacacacaccaacccttcttctgttctgcttccattccact

SEQ ID NO: 1391 - DNA, 144 bp, Glycine max
ttctgcttccattccactaaagttttggtttttctagcctccccattcttcttcttcctctgggttttcacttgttggattttcttactctctttcattgtcaatggataaccaggatcaaagaagaactcacactgcaggtgc

SEQ ID NO: 1392 - DNA, 148 bp, Glycine max
tctgcagggagagtggtaggaaaaaccagtgttattaaaatggtcttaggcctattaattatttatttattaactataagtcatatgtctcatgagatattattaattttaacacaaatttctaagtaatttttgtcatgcgcgtaaa

SEQ ID NO: 1393 - DNA, 97 bp, Glycine max
agaatctcaaccagcttccccatgcagctattctatcaaaactcaaaaaaccactcaccctcttttctattctattctctcagaatttcttggaggg

SEQ ID NO: 1394 - DNA, 122 bp, Glycine max
catatgtttgtgcgtcctatatttgactaattgtttgtcttttgatttttcttttcttttaatgcattttatacttttttattgctttgttttattgtaattaagggtgagaatttgaaaga

SEQ ID NO: 1395 - DNA, 151 bp, Glycine max
aatgtgcattggtttcaaaagatatatctaatctaatatacaaccttatatagtattgcttctaatacttaattaagaattgaatacgaaattatgaacgaactaatcataaaataaaataaaaatatgaacgaactcggttaattagctt

SEQ ID NO: 1396 - DNA, 102 bp, Glycine max
cttcccgtaagccacacaccaaaacactaaaaaaaggagagagagagaagaaagacgaagcttatataagacgcacaaagcacgtcaataatcggccaattg

SEQ ID NO: 1397 - DNA, 89 bp, Glycine max
tccaactcactcctcatacatatcatatatatataacttttctatgaaaaatgattatattttttttatggctaatactctatgtctct

SEQ ID NO: 1398 - DNA, 101 bp, Glycine max
aattcttgttaaaggatcataacattaactttaacgattattattttagatgattatctttataattttatttatttatgattaaagtttggacaaattaa

SEQ ID NO: 1399 - DNA, 185 bp, Glycine max
tttatgattaaagtttggacaaattaatgttatatttatttatttttaatattgtctgtgtttacttttaatgttatatttgagttatttaataataaatttttactataattataataattatttttttattgttttatttttgttaactttataatgaataaaacgtgagcacaaatatgatt

SEQ ID NO: 1400 - DNA, 160 bp, Glycine max
cttgatatctctacattgatgtttttttcttcttctttaattcaacatataaattataaagattatattttttttttgacgaaatatatagattatattatttattattattattatttaaaactaaattctggtagcaaaatggtgagtgaagcttgct

SEQ ID NO: 1401 - DNA, 103 bp, Glycine max
ccaccatacatccaccatgtgaggagcctctggcatcaggatacatttatatatatattcatcaatttacggcttatccttccttgtttattgtgggcaatgc

SEQ ID NO: 1402 - DNA, 425 bp, Glycine max
gggagtgcactttacaggataacaatacaataataactgtttattaaaaaagtaatggtgggatctgaaataaaataaaatatatatgtgacaaaattccaaattaattataaactaaaatatattatggatttatgataaattaacaaatatattatggatttatgataaattaacaaattttattttgaattcttattaaaaaattattgtattaagtctctaataaaaaaaaaagtttttatttcttctaatatatctattttttatttttattcataaaatatacggatcattaattttattattagtttttatcaaatatttttcaaagaaactaatacaaaatattatattaaaaggtttaagataaaataacaagaattaaaaatatatattttttattagagactcaacacaaattt

SEQ ID NO: 1403 - DNA, 109 bp, Glycine max
aagctaggccaaggtacacattcattcattcatgattcacttttttctttcttttttttttagaggtggattattgattttatatagagaggatttcaattaatggaca

SEQ ID NO: 1404 - DNA, 108 bp, Glycine max
tttatccttatactggacatgaaaattaaacttaagtgattaataatgaatgaatgaataactatagtattcaatgttttgtgacttgattaatgcagggcaagtgat

SEQ ID NO: 1405 - DNA, 103 bp, Glycine max
acttcttcgctggaaacccctttctctctcttaaatcttctcattcttcttcttcttctccctcccgccacctcacttaccctcttcctaaaccctagcctcg

SEQ ID NO: 1406 - DNA, 320 bp, Glycine max
gtgggtgggaaaggaaaaagaggggtaaagaaagaagaaagaagagaaattatatagataaataaataatttaagtaagaatagattttgtatttccgtttcaaaataaaaaatatatatataattaatcattttaaaataaattataaataaatattagaaggtaagtcttttgtgagatttaaaaaaagattttagatctaaaaatgagatttgctattagattaaaaaatttaaaaagtatgatacggataaatttatcaaaaaatttattaagatctcaaaaataaaatctgttatgagaggagttcttggaagca

SEQ ID NO: 1407 - DNA, 131 bp, Glycine max
gaagacttccctgcatcattttaaaaaataataataatgtgtaattgtatgttttcccactatttcttgctatttggtttttaactaaccagtcagatcctaataaacagtatcatctgtggcctacttga

SEQ ID NO: 1408 - DNA, 152 bp, Glycine max
tgcctgcctatgttagatgtagtacaaatcaaattaaaccaaagaaaagaagctcaatttcaaagtgacaacataaaaataaaataaaattgtaaggcatctaagtaatgcaaatgataagttttccaaagaaatattaccaatttgccggc

SEQ ID NO: 1409 - DNA, 107 bp, Glycine max
tgcatacatggtacccaaaaatttactgtaatttatttcactttttttataaaaaaaaatatgtcaaaaattaaaataaaataaaaagtctgggcatatatccatcc

SEQ ID NO: 1410 - DNA, 129 bp, Glycine max
catcccgctccaaataaaaaagagacacttacaaaatatatatatatagaaggaccgatattaactttgatgatcaatagcgaaagttgtaaggtatactatgtttgaaagaacacatgcaactccagc

SEQ ID NO: 1411 - DNA, 230 bp, Glycine max
caggataggcgacagacattaattttcattgaaaacaatgatgtaaaaaaattacgtattattaagaaacataattataactatatgtttaaaaatgttcaatcctaaaaatagctaactataatatatatatatatatatatatatatatatagctaaattcagtgttatagttttcaaatataatcccgtgattgattcttgttctacctaaaccacaccaacacgtg

SEQ ID NO: 1412 - DNA, 146 bp, Glycine max
atgcgtgctctttagccaatgtcctacataaaaaatacttaatagttgttgcagttttttttttttatatacacgccaataaaataaaataaaactattactattattatacacagttggtgaagtttatacttgcatacgcatgc

SEQ ID NO: 1413 - DNA, 152 bp, Glycine max
aaataatgattcgaaggaaaaaaaaaggaaagatattttatttatttatttcatagaaaataaaatagagttctttttcatgaaataataaaataaaaataaataaatagaatgtgttaagtcaatttttacagccatcttactctcaattt

SEQ ID NO: 1414 - DNA, 152 bp, Glycine max; identical to SEQ ID NO: 1413

SEQ ID NO: 1415 - DNA, 144 bp, Glycine max
tgacaaagtgttgagattacgtaagttatgtttcaataagttgtatttcatttttatatatatatatatagttgtctatattctctattagttaggaatgtaataactcattctccgtgtcttatttgtgtttggatcctgtga

SEQ ID NO: 1416 - DNA, 452 bp, Glycine max
ttatgcaactgcctttccttttggttgtgtggggcggattgtaattttctttttcctgaaataaaagataaggtaaaattttatgatttttttacatttgatagggttttctcatttttattatatatgatattgacagtaatatctaataagttcatgtattttttttatagtttataaataaaaagctgcaagtgtttaaaattaatttcatactaaatttatgaatactacaaaatatatttttatcaaaaaaattaaattaaatttttataaaaatattacataaatatattcgttcatacagttttatatttttttatctatttcaacggataatttataaaacatttataatttaataagataatttttttaattttaaaattactatttaattttttaacttttcagttaattttttattagatagccaatgtgtcttggcacct

SEQ ID NO: 1417 - DNA, 104 bp, Glycine max
atccagaacaacaaatggcagctatatatatatataaatgataaaatgaaaagtaaaaataaagatagagaaatagaatagtacttacattcaccacggtgatc

SEQ ID NO: 1418 - DNA, 139 bp, Glycine max
ggccaagctgacttgtaataacttgtagcagtaaatgaatgaatatacttatgagaattaaaaaaaagaagaagaagctaaaaacactgtctttaaaatccaattctttgaactttgaactatcaattcgaggtgcact

SEQ ID NO: 1419 - DNA, 90 bp, Glycine max
gccacacacacatcatcatattcacttctgttgcccttcatatccatccatccacatgcatgccacactttctctttctcaagtttggcc

SEQ ID NO: 1420 - DNA, 99 bp, Glycine max
aatacgcttattctacatataatttataattaaataataatataaaaaaattttattattattatttactttttgtattggactgacagttatgttacg

SEQ ID NO: 1421 - DNA, 127 bp, Glycine max
ttggctctttgctctcagtttcatcacatctttttctctctctctttatttctcataaaatcatttgttacgtctatttctcttttactcccttttttcttcttcttcttcctatccatccaccttg

SEQ ID NO: 1422 - DNA, 131 bp, Glycine max
ttggctctttgctctcagtttcatcacatctttttctctctctctttatttctcataaaatcatttgttacgtctatttctcttttactcccttttttcttcttcttcttcctatccatccaccttgaaga

SEQ ID NO: 1423 - DNA, 122 bp, Glycine max
aagtcacggtcataagttcaactttaaaataaaaatacatacatacaacttttttatatagttttttaatagaatttaataaaaagtaatcagtttttaaacttgatctttccatataatca

SEQ ID NO: 1424 - DNA, 114 bp, Glycine max
gaggtcatgtccaacaacatactaatgaatgtgcttagtttgaggcccaaattatatatatgtctcttgaaaaataaaataaaatggtaagaaagtttatgtgctgcttgttgc

SEQ ID NO: 1425 - DNA, 108 bp, Glycine max
aaatcacttcatttggatcagtacaatagaaaatctcgtccactcaataatgacttgaatagctctaactttgtcacacacacacagtcacacaaactgcatgaagca

SEQ ID NO: 1426 - DNA, 155 bp, Glycine max
aggaaatgtaaaggttcaactaacaagtagtcttattcacacaaaaaaaactaacaagtagtcgagtaatattgcacacacacacacacagagtcagaaactcaatagttcttcataagaacaatctactttattatatgtcacaggattccgag

SEQ ID NO: 1427 - DNA, 180 bp, Glycine max
ttgtaacacgcttctaatgaatgttatttaattaatgtcaatttggataagtttctccaaaaatatttctaggaaaaaatattaagaaaataaaataaaatgttgtatcattttttgcattagttaaattatagaaattctcttatataatttcttaaatgatgaaagaactcctataaa

SEQ ID NO: 1428 - DNA, 111 bp, Glycine max
gttcttcacgaccagcacaatatagtgtttcccaattgaaaccaatacatgtaaggtatattgtgtaaacaggacgtgaacatcatcatcatccacacgtagacaaaggca

SEQ ID NO: 1429 - DNA, 182 bp, Glycine max
tttgagcaacttacaatcattatattatttgatagagtttattgataataactttagattactttaaaaataaaagaaatgaaaattattaaacaagttttattttatttttaaaactcttatttttaactttaactttgaattgtagcttttaagtttaaaaaaatgggccaaactcaaac

SEQ ID NO: 1430 - DNA, 125 bp, Glycine max
ccagattattgaccatgtccctttgtcttgtcttgttctgtacttttgcaacataaaaattgtgtcattgctttctgatcttaacaagaagtgaaaaataaaagtaaaaggcaacggaagaataa

SEQ ID NO: 1431 - DNA, 123 bp, Glycine max
gtggaatatgcatgttgttgactatatttgtttaatcaaagtcactccattaattgaagaaaacatataatattggagaaatggcataaattaaattaaatttcaacggctgaagataacttt

SEQ ID NO: 1432 - DNA, 189 bp, Glycine max
tttaaagtagtatctcgtgcattatatagatatttttaaatgtaaagtataaaataaaataagcttaaatattttttttaagtctatgtgaacatggttttacctgattttaattgttacaatttatgtttgttacttttagatcctaacagtttttgtgtttgtttcagttcttaccattaactgcgg

SEQ ID NO: 1433 - DNA, 170 bp, Glycine max
aaacgcttatagtttgcttttaatatattacttgcaatattacatttcaatttattaattgacttcttataatataatttttataaataataataataataataataataataataataataataataataataataaaatagagatataatgaaacttgcttgactcac

SEQ ID NO: 1434 - DNA, 102 bp, Glycine max
taccgacaagggagatgaaaattattagtccatgcagtaatttctcttccgccttttttattttatttttattttttttagcatttatatgcctatgtgcaa

SEQ ID NO: 1435 - DNA, 98 bp, Glycine max
ttggtcctccctcgtactcgcgctcgtacgtcctctttcttatcggcgtagtaaccaaaccaaaccaaaccaatctcccccttcttctccgcttcaca

SEQ ID NO: 1436 - DNA, 97 bp, Glycine max
cttcttctccgcttcacaacaaaaagatttagagagagaaactctctctctcttctcttctcttctcttcaaccactttctctttctggaaccgtcc

SEQ ID NO: 1437 - DNA, 97 bp, Glycine max; identical to SEQ ID NO: 1436

SEQ ID NO: 1438 - DNA, 102 bp, Glycine max
ccacttggactcatgcaatgagataaatatcatgtgatgatatttcctctctaaaagatagaattattattattgcttaacagaaattcataaagacgaaga

SEQ ID NO: 1439 - DNA, 144 bp, Glycine max
caatcacacattgtttcttgaaaagttattattattattattgttattatcaacttattaattgttttatgggtactgaatattaccttattactttatctataattttgtttactgttaaaatttcagccttgtaaggaaatg

SEQ ID NO: 1440 - DNA, 145 bp, Glycine max
aagaggcccagaattgtccagaagaatttggatgtatgtaaatagtcacaccatcaattcaattcatgctttctttctcttaattcatttcatttcattttttgcagacactttttcctggtttgtggctcaccgatgttactgc

SEQ ID NO: 1441 - DNA, 126 bp, Glycine max
tttcgcttctgtgaaagatctttgtttcacttttatcaatttgctagagttctaatgtactggatgctgcagttttaattgctcattttattttattttttttaccttcaatccaagaaagaacgt

SEQ ID NO: 1442 - DNA, 148 bp, Glycine max
tgtccaacgagtccatttcttggataagatgccataaaatcctaaataggcataaatgatttctttctttttaattgccagacttttaaaaagtttttatttatttatctgttatttataaaattcaagatgacattaattattcatt

SEQ ID NO: 1443 - DNA, 105 bp, Glycine max
gccatgtgagcaatctctcgatgagtaaaacccagaggcttgatgatgatgacaaaatagtccttatttccgatgcccacagcatgggaacccactcaccaactg

SEQ ID NO: 1444 - DNA, 155 bp, Glycine max
ggcaaacagtccaacatcacgtattgatttttattttatttttaaaaattctaattattaagaattaacttaatgtcacttaaaaaaattgagaaaatgcttaaatgctcatttgtaaacttctattatgaagcctcagcatttctcgggagatc

SEQ ID NO: 1445 - DNA, 169 bp, Glycine max
acagcttctggcagcataatctatggagacaagatttgtgtaagatacaaaaaaaaatataaagaaaataccagaacaataaaatgtacttagcttgattagtaattgaaagcataacaaatgtatgagagagagagacaggcctctagggtactacaaataattccca

SEQ ID NO: 1446 - DNA, 114 bp, Glycine max
cgtctccgaagaacacatgatgtttctttctttcttccccggaatacgaatatgctatgcgtttccctgtggacgcagctcctctcgcagttcagcttagccgagtcgtcgtta

SEQ ID NO: 1447 - DNA, 371 bp, Glycine max
tgaatctctagtgaacttgtgcttgttaatttagctagaattatgccataaaattctttatatgaatatttaacataactatatattcaacatttttaaataaaattacaaaaaatatttaaaatttaacataacttaaatctattaaaaaaaatttaagcatcaattttttaaacaattttctatgttttaaaaatataataagaaataattgtgtgactataatataatatattttctctatttaaatactcctattttttctgcatttttgaaaattttaaaagttaattatgttttcttaaaatacaattctttttctgagacttcacatttttttgttgtaatgggttgaggtttaatgttgcgga

SEQ ID NO: 1448 - DNA, 123 bp, Glycine max
tcaacatatgagtggaagagaaaaatattgtagttaaactaattaattagacagacagacaagaagagcttaaaaattaaggtagaattagatttagaaaaaaaaaaatgtgggcgcatctaa

SEQ ID NO: 1449 - DNA, 94 bp, Glycine max
aaacaagactcatcttgaactataaaaaaaataaaataaaaaactaaaatggataaaaattaaaagaactaaaaatgacagacgggttaacaga

SEQ ID NO: 1450 - DNA, 93 bp, Glycine max
aaacttggacttgctcgtttaaataattgagtttgttttgttaaattaaacaaacaaacaaacttgctcaaacatttaaccaaacgagctcaa

SEQ ID NO: 1451 - DNA, 109 bp, Glycine max
cgcttatctaatggtatttgcttttcaataactctatattataataataataatatcacgtttacaaaagaaaaaacaaataagttggatctgaaatctgaatggccac

SEQ ID NO: 1452 - DNA, 87 bp, Glycine max
ggctaacacatgttaattgatctatattcacctaccacaccaaattaaaaataataataatttttaaaaattatgagttccgccgtt

SEQ ID NO: 1453 - DNA, 102 bp, Glycine max
cattgctggattcacactcgagtgcatcgtgtttacaaaattcggagtatatgtttgataaaccataagacagacagacacaaggagaacgtacgacttgaa

SEQ ID NO: 1454 - DNA, 101 bp, Glycine max
gaccaatgaataccaaattgagcatatatatatattcaaatgaatacaactagttataacaaaagtacctttgggaacatcaatcctcgacctttctgtga

SEQ ID NO: 1455 - DNA, 136 bp, Glycine max
atggaaccactcacaacggttttttttctttctttctttctttctaactttcaaaatataatagtatgtattttgtataaatgggcttcaaaaatagtaaagagaaaaaattatgttctctcaaatgaatttaatt

SEQ ID NO: 1456 - DNA, 241 bp, Glycine max
tcttgtccaaatacaagaaacatgttttcattttgacaatgtcataactgattgttaacaacacacacacagatggatgtacttatttctatgaataaataaattcatcttaaaataagtttatctttcaaatacgtaaaactatctactccttaaatttaagaatcggtttaaaactgtctcatattagatcatttttcttatataaataacattaatatttagttcaaccggtcagtca

SEQ ID NO: 1457 - DNA, 142 bp, Glycine max
tcctacacattccgttcaagttctattttcttgattaatcctctcattttcaatccacaaaataattaaatttgatactttttagatatcaaaaactaaactaaactaatgaaactagttacctcgaattaactgattgttc

SEQ ID NO: 1458 - DNA, 90 bp, Glycine max
cgtgttcgatcaacttccaatctcaatcttacatgattgatattttattttatttagctaccaaaacttaatatagatcgaggatcatga

SEQ ID NO: 1459 - DNA, 140 bp, Glycine max
ttggacttggacatttggagttgaattaatattgcataggtgaaaagaaattcatttatcatggttttctcaaaaaaatatatatatatataaataagttatttttaagagtttttcataaaaagtgtttggcctaactt

SEQ ID NO: 1460 - DNA, 137 bp, Glycine max
ggaaggagcccatctaaaacttcctttttttataataaataataaataaagatttttttccttatttcctctctctcaaaatctgatatttctttaatatatatatatatatatccttgaataggtatccctaacgc

SEQ ID NO: 1461 - DNA, 141 bp, Glycine max
caaccaccttcactctcgctcacccctcggattggcagacagagacagggctatccttagatgttagaaacttattatagacacacagacatgtacatatatatatatatagagagagagagagagagggagagagaggga

SEQ ID NO: 1462 - DNA, 181 bp, Glycine max
ttggcagacagagacagggctatccttagatgttagaaacttattatagacacacagacatgtacatatatatatatatagagagagagagagagagggagagagagggagagagagagagagagagagggagagagagagagagagagagagagacttcccttggaaggaagtttcaact

SEQ ID NO: 1463 - DNA, 313 bp, Glycine max
tgggcaaatgtacaggagtggggtaattttttaaaaaaattacagtaatgcgtaaattttggaaatattatagattatgtataaatcctattttaaaacaccactttagaatgtaattatatatatatatatatatatatatatatatatatatatatatatatatatatatatatatatatatttgaagttatgatcaaaacacgacttcaatattttttttcaaaaaaattacagttttaaagttatgttttaaaacataatttttttatatcaagttgtgttttaaaataggactgagttacccatagca

SEQ ID NO: 1464 - DNA, 186 bp, Glycine max
cgtgaatgtgtatatgtgtgtgtatatatatatatatatatatataaagttagttgaaaaagacattttatttaatttttggtttttttattaactataaattttgtttaaacaatatattttttagtaattatttagtaatttataatttttttcatttttatcctcattacatttattcaattt

SEQ ID NO: 1465 - DNA, 276 bp, Glycine max
aatgcaacatcctgagtgagacctattaaatatttaactaattttgaaactaaggagtaatagataatgtcttcaaaagcttatattaaagattgtattgctaaactttctcagattacactaacatatgaatttcaaaatatgtaaaatgagaaaatagtagtgtgtataatatttatatatatatatatatatatatatatatataaaagattatgatgtattttaatttgaattaatgttagatccattttctccttatgtgtctatttatag

SEQ ID NO: 1466 - DNA, 251 bp, Glycine max
tgatggtggcaataatgatagtagttgtaaagacattaataataattatggtgaccgtaaaatgatatgtgacgacattaaaaaatatccatgtcaaataagaaatatatatatatatatatatatatatattaaaaaaattgaatcaaattaacaaaatatttttcttagttttaaaaataagtgtaaaagatatattttgttttaaaaattacatttaaaaataaaaaataaaaaactcccaaccaccc

SEQ ID NO: 1467 - DNA, 109 bp, Glycine max
gggacaaacaggaaagaagaatctgaatctgcctcagaaaatggatccaggaaggaaggaagcttaaaatctaaaaaaaaatacgtgtatttttcaaccaattgccatt

SEQ ID NO: 1468 - DNA, 113 bp, Glycine max
aacgggaagcaagagattactaggaagtcaagtttctggagcaggtttaactctatcggtggtgtcatggcgcgagcccatcatcatcatcaccctgaactcctcgaagtcga

SEQ ID NO: 1469 - DNA, 99 bp, Glycine max
aaacatgaaggaattgatctctttctctctctctctctttgtcgtttctcctacattgagatattattaattagtctaataactcgtgacatatgcagg

SEQ ID NO: 1470 - DNA, 116 bp, Glycine max
ggagctttgagggttgattctctggtgtagtagcaatcagcacaatagaaaatggtatgcttctgaaaatgtttgcactattattattattatttttttgtttcctgatgttgttt

SEQ ID NO: 1471 - DNA, 179 bp, Glycine max
cagctcctttgtctttcctagaattattttttcttgaatcatctctattattttacttcccccctttctaacatgttaatcaattaatttattatgcaatattgatgccatgatgatgatgatatgtacatttgtcacagttttttgacggatatggatatcatgggacatcatttgag

SEQ ID NO: 1472 - DNA, 79 bp, Glycine max
ccaggatattcacgctgtttgatgttatttcaattacacacacacatattctaacttcagtggtttatggtatttggca

SEQ ID NO: 1473 - DNA, 123 bp, Glycine max
ggctggtatgcacttgacttactgatttttgtcatagatgtctcttttctctgtctggtcggatctctctctctctctctctctctctctctctctctctctctgtacggcttctgaccatat

SEQ ID NO: 1474 - DNA, 119 bp, Glycine max
tggatcgatgtctattgcaaaaacttttatttatttattgtattataagcagtagatagaccagtagatgccacagaaaatacctttgattacttgtgaacgaagctcttgacgagggt

SEQ ID NO: 1475 - DNA, 196 bp, Glycine max
gaaactgtgcaggagtgcttgtgacatcaacactgctctagtcaatgctatcaccccgcccacttggattttctgtcaatcttctcttatcattcatttattactatttaattaattaacacactaacagtaataaataaataaatctaaataattgagtccataatcacattcacatccatccatatcccttcct

SEQ ID NO: 1476 - DNA, 126 bp, Glycine max
aatcgcattgtcctgaaataatgaaatcaaaccaaatacaaaataaatcttgtggtacgtcaactcaaacactaagcagctaattccttattattatattattatatatatggcagcacatgacat

SEQ ID NO: 1477 - DNA, 140 bp, Glycine max
ttcgctgcagttgttcatcaaaataaattattaaatgtgatcaattggattttttggcataaataaataaaaaagattaattattttttttaactggcagtgagaagatagaaaagcttaaatcacgcatagagatggtg

SEQ ID NO: 1478 - DNA, 155 bp, Glycine max
gctatgtgccaaagcatcgatgctattacaggtgaggatgctaagaaatttctattaatttcctttaaatttataaaataaaataaaattctggataatcaaatatgtttattttgttgctgtacaaattttttgtacaaggacacaggtcaagc

SEQ ID NO: 1479 - DNA, 75 bp, Glycine max
ttagatcatagatgtcttggaagataaaataaaataaaataataagctcaataacaatttatgggcacacctcat

SEQ ID NO: 1480 - DNA, 246 bp, Glycine max
tccaacttaccttgttgtcctatgttttttgaagttaattttctttattatttcaaaaatttattgttattcaaagtacacatatgttattattattaatttattttattaagtcatattttaagaagaaaattgcattctaatttagacaaagttatcacttttttggattctttaattaaatttgggttaagctttttttaatttttgagaggtcattttgctaacttgctagctcacatgcac

SEQ ID NO: 1481 - DNA, 173 bp, Glycine max
ttgagggtatgctccaaccccatcattttactgagaaaattattcttcatacaaaagaaattaataatgatgatgatgaagaataatgaaaaatgatgatgaacaagagttaattaaaataaataattggttttgatgaaacaggtaaaaggagaaatcacatacaatgggca

SEQ ID NO: 1482 - DNA, 149 bp, Glycine max
cccattacctagccaattcattaatgattaaatcttaatcaagtaagattaaattcgaatcaaacacttttagaactttaatataatataatataatataatataatcgaattaagtcaaattgaatcacaggtgaatatgcctacctc

SEQ ID NO: 1483 - DNA, 226 bp, Glycine max
gcatattccaatttgtaagcaattagttttcactttctatttttatttttattttgttttttgtttttttatctattatttattttagctgctttattttatttttcaattttttttctctttactcattcttactttatttttttcttttttttaaatagaaaaaataaaaaaaaataaaaaaaataaataaataaaaattatttattctgtgataacgtgcacg

SEQ ID NO: 1484 - DNA, 123 bp, Glycine max
ttggttagaaagtgccaaaagtattatgtctcaatttgatatatatatataaaggcatacgaaaacaaatgacatcaacaatgtggggggaaaactgaacaagttatgggctttgaagtttga

SEQ ID NO: 1485 - DNA, 97 bp, Glycine max
acaattgcccgactatcaacaattgaattaacttttttctttctttctaaagatattcatattcctaggttgccattaagcatggtggtcatcaaag

SEQ ID NO: 1486 - DNA, 103 bp, Glycine max
tcccaaacacatctttaacatgactgaatttatgtagaattatttatctacttaggtataataataataataaactcattattaacaatgtgtggatggatga

SEQ ID NO: 1487 - DNA, 123 bp, Glycine max
ttccatttgaatctcaagcctaatgatgatgttaagtgttaattctatcttttttcttctaaaataagaaactatcgtcatataataataataataatagaaaaattattatgcagtgatggt

SEQ ID NO: 1488 - DNA, 235 bp, Glycine max
ccacagggactttgtttgtacttagattaatgcaaacccaatttaaaagcaagagataagaaatttaaaatttaaaataaaagataaagataatagataagataagatgaaagaaatttaaaataaaagataaagataatatataagataagataaaagaaatttaaaatttaaaataaaagaaaaagataaagtcaagataaaatagtgttaggaactgacttgccttgtctgc

SEQ ID NO: 1489 - DNA, 292 bp, Glycine max
ttggttcattgtttcgttttgttaaagttttaaaaattttattttgattctttatgttgtattatttaggttcattaatcaattttcggtttacaacattaatattccgttaacatttaaattttgaaataataaatttaacataataatgactaaaagttatcaatatttttattttattttagaaattatgaaacaataaaaaaataaaatcatctcttccaatctagatttcaaatcgaaaattaacttgttatggcatgagaaatacaacatctcccaatgttatgca

SEQ ID NO: 1490 - DNA, 235 bp, Glycine max; identical to SEQ ID NO: 1488

SEQ ID NO: 1491 - DNA, 128 bp, Glycine max
acacttgggcttaatgtcattcacataatcaatgcttaatatatatatatatatatatatattattcattgctttagcactgacagatttatacgttacatatctttgtcctctttatttgcaggtcc

SEQ ID NO: 1492 - DNA, 89 bp, Glycine max
tgaacaagcacagtacgaaactttgttaatcagtgagggagactcatatatatatatggcttttgatttctaatcccattcaattccct

SEQ ID NO: 1493 - DNA, 92 bp, Glycine max
gctataagctagctccttcaaaaatgtcgacacataattttaaaaacaaaataattaaattaaattgaagaaaaacagacgcccgagttaat

SEQ ID NO: 1494 - DNA, 112 bp, Glycine max
tcccttatggcgtgtatgcatgtgtactagaaaactagaaatagaacatttgagatatgagaagcaacacatatatatatatatactcctaattgattaatgggtcaaccaa

SEQ ID NO: 1495 - DNA, 95 bp, Glycine max
agccattcaccatccatccagccagccatccagccagccatccagccagccaaccaactatccatccacaatttgtggacacaattccggcattc

SEQ ID NO: 1496 - DNA, 142 bp, Glycine max
tttgttgcaggtacaaacctagaaaagtaatcatgacatatacatatatagagagagagacgtggtatatatatattcaaacaattaattattttgcagcaacttatagataaatattttaggtaaaatgaggcaggcatga

SEQ ID NO: 1497 - DNA, 142 bp, Glycine max; identical to SEQ ID NO: 1496

SEQ ID NO: 1498 - DNA, 238 bp, Glycine max
  unsure (1)..(238): unsure at all n locations
ggattcccaattgagtcacttggcataattgttcattgatacattgaagcaagattttaaaagagagaagaaaaagccatatatatatatatatatatatatatatatatatatatatatatatatatatatatatatatatatatatatattaactcacattttttttttatgaatgctagngagttataaccatcaattgtcttaaaatataatgatgggagtttacttacacaca

SEQ ID NO: 1499 - DNA, 93 bp, Glycine max
aataatgggcggttaaggaaaacatacacaatagaaagtagaaccactttaaataataataataaatgaaaaatatctatgcacccactgttt

SEQ ID NO: 1500 - DNA, 134 bp, Glycine max
ccagctgacctgaactgagtctcagttctagatggatgatgaaacgaatatataggtgtaagggtactctgttaacaactatatatatatattcttcacttgatatatagtatctgtaagtgggacagtgtggc

SEQ ID NO: 1501 - DNA, 104 bp, Glycine max
caccgcaatagctacgttctcatttaccactgccacctgctccggctgttgctgctggttattggtattattgttgttgttgctattgttactctccggcactg

SEQ ID NO: 1502 - DNA, 99 bp, Glycine max
atttggagcgaagcagatctgattattgtttctggatctggattttttgtgaaggaggatgtgtgtgtgtgcaacgagtttgtttcgtatttgtgcttg

SEQ ID NO: 1503 - DNA, 105 bp, Glycine max
tgttactctccggcactgccgctgctgctgccgccgccgcacgccgccgacgagtcctcgtcgcaatagcctctccctccaccacgggactatgctgctgctgct

SEQ ID NO: 1504 - DNA, 179 bp, Glycine max
aaacgttcaaacttacaatcatatgtcatcagattatttaggaaaaaataaataaatagaggctccataaacaagacttatcccattttatgtacattaatttggtaaatttaaaaccaaattacacaaatttggtgagtaaataaccttcagaaggacaactaatcccgttgtccctt

SEQ ID NO: 1505 - DNA, 100 bp, Glycine max
gagtcctcgtcgcaatagcctctccctccaccacgggactatgctgctgctgctgctgcttttgttgctgttgttgttgatcttgttgttgctgtttcgc

SEQ ID NO: 1506 - DNA, 117 bp, Glycine max
aactgtaacatcaaatgaaatgacatttgttttataatgaatttataaaataaataaataaaagttattcttagagtaattttttatggaaaaggagggccaaaggccattcttagg

SEQ ID NO: 1507 - DNA, 101 bp, Glycine max
ccattgagggctttacaatgagaagggggtgaaagaaagaaagggagtaagtgaaacccctaggagagggggttctgtcgtggtgtcttctgtcccttgga

SEQ ID NO: 1508 - DNA, 153 bp, Glycine max
tggattcaaatatataagattagggggagcaaaataaaaaaaatttaaatacttaataataattttatcaaaatcaagaggtgcacctgcatcccttatatatatatatatatatatatatatatacaggtccgtcactgggttcgagtcgta

SEQ ID NO: 1509 - DNA, 110 bp, Glycine max
ggtggagaattggaggttgttgccggagacaccgtggttgtggtggtggtggaacatgaggttggcgatggctttgccggggcgtttgagcatcatgttgttgaggtgca

SEQ ID NO: 1510 - DNA, 211 bp, Glycine max
aagtggtgcacgtatggtaatgtatacatacatatatatatatatatatatatatatatatatatatattaaaaactttctccgataataaaaaataaataaatgtttctaacattgtatagttaatataaagtattttcttgcatagttaaattgtgaaaagttacactagtgtatcttaattaactaacgaggttgatattgcttggct

SEQ ID NO: 1511 - DNA, 107 bp, Glycine max
ggtgtattgctttcccattttctatttgtttttaggttatttcgacatctcgagagagagagagattttctgattgagagagattttgagagagagagtgatgaact

SEQ ID NO: 1512 - DNA, 254 bp, Glycine max
ttgagagcccagcaataattaaggaccgtcactaagttaaaagatattactgccttcattctaaaatgtgttagtgttgttatcagtatttattgatattaaatcttttttatataaattagaataattatcataaataaaaattattttaggacctatttttcaatgagaacatttttgtaagtttttctttaataagattgttttaatttcttcttcttcttaacattttatatctctttccatctatcttt

SEQ ID NO: 1513 - DNA, 98 bp, Glycine max
tgcccgactatcaacaattgaattaacttttttctttctttctaaagtcgacagttgaatcatgaatcaacttagcttaaacaccacgataacaagca

SEQ ID NO: 1514 - DNA, 252 bp, Glycine max
tttatatctctttccatctatcttttttcatctattattctagtattaaattttaatatttttaaaataaattatcaataactaaaaatgaccttatatcacaatttaatttaatttttatgatacatgcaaaatgtaatttacatgttaaaaatatttattgattacaatttttattataatatattcaaagatatttatttatcataaactttagttatataaaataaacagttatttgatgaactactg

SEQ ID NO: 1515 - DNA, 160 bp, Glycine max
gcttgacctgtgtccttgtacagaaattgtgtacagcaacaaaataaacatatttgattatccagaattttattttattttattttataaatttaaaggaaattaattgaaatttcttagcatcctaacctgtaatagcatcgatgctttggcacatagc

SEQ ID NO: 1516 - DNA, 142 bp, Glycine max
gtttcgcaaggtgtcgtcggaggcgaacggcggaagcgtgtcggtggaggaggaggactccggcgtctgcggtttcgcgccaatggcggtggacgcggcggcggcgccggagagtagctgcagcgtcttcagctcctcctcg

SEQ ID NO: 1517 - DNA, 147 bp, Glycine max
aaaccaatcggcatctgcttttctgaggcagatgacatatatatatatatatatatatatatatatatatatatatatatatatatatatatatatatatatatatatatatatatagagaatctctttgtaacatgctagttaggg

SEQ ID NO: 1518 - DNA, 142 bp, Glycine max; identical to SEQ ID NO: 1516

SEQ ID NO: 1519 - DNA, 107 bp, Glycine max
aagcatgatggatggatgtgtcaaattattattattattatatcagagtctcaaaatacacataaaaaggttacttactaggacacaatcattacctcttcgcatgc

SEQ ID NO: 1520 - DNA, 115 bp, Glycine max
ccgaattacccttctccagcggcgccacttttcccacttctcataatttatttatttaaccgctaatgcatttattttcatgtttgtacaatgtacatttgtctcatgtccttca

SEQ ID NO: 1521 - DNA, 98 bp, Glycine max
gcatgcgtttctcttcttctctttttattttaataaaaaacagctatacatacatacatacatgatgcatgagagatatggatgggaatggcatatcc

SEQ ID NO: 1522 - DNA, 141 bp, Glycine max
tgattgtacggtctcatgggccccaagtcaactaaacaagaatcagatggctttatagtttgaccatatcattggaattttccttttttaataaattaataaataaataatataatctagaaaggtttggagttataatca

SEQ ID NO: 1523 - DNA, 82 bp, Glycine max
tttgttatgcatgtgtgttgtatttttatttatttatacattgtttgtaattattataatgttgcaaggcaacaacatactt

SEQ ID NO: 1524 - DNA, 112 bp, Glycine max
tcctagctagccatgcagttttcaatgttgcatgaaaagcctcataactcataagcctttaattctctttttcttttctttttaaaagtaactcctttgatgcttaatagtg

SEQ ID NO: 1525 - DNA, 78 bp, Glycine max
ccagaagttccctccctatttttatatatatatattttttaaatgctgttaagaaaatcatggattgttgctttggtt

SEQ ID NO: 1526 - DNA, 150 bp, Glycine max
ttgttattgattgtttaagtgatttaattaaattataatagaagtttaatttaatttaaatacttaacaaataaattaaaaaaattgatgatttaattttatatgtgattagtgagtttttagtgttttgaatttaagaggatggacttt

SEQ ID NO: 1527 - DNA, 234 bp, Glycine max
aaagtccctataccaggtagattatatacacacagttttaatttgactaatccaaaaatatttgaaactctatttatttatgtatagaaaaattaacataatatatacttttaaaatatatgtatcatttttttatctttatatatatatatatatatatatatatatatatatacaatgacacatttaagaattttcttttataaaaatgaaaattttccttccagtgttgaa

SEQ ID NO: 1528 - DNA, 133 bp, Glycine max
tgccagcaacactctctttaaccctcccttttttattggttaaaatgtagtattagaaactataaattttagtgggtcatactacttatgtaatgactctctctctcctaatttagaaataggacccaccaaa

SEQ ID NO: 1529 - DNA, 218 bp, Glycine max
gtcaaaggtcccatagcatgatagcaaatttatacttctcattagttgtaagcatttgtaaattattattaaaataattttttattaactaaagcaatttttgatattttaaaattactgttttaaatactattttcatttttatatattttattattattaaagtaattttatgtaagttaaatcaatttttattggacaagataactaacttgaaa

SEQ ID NO: 1530 - DNA, 95 bp, Glycine max
cccaagcttgattgagaagcctcatcctcatactcaacctcacaatcacatgatcgctgacacacacacacacacatcttgtcttcctttctgcg

SEQ ID NO: 1531 - DNA, 231 bp, Glycine max
ggatattggtataaattgccttttaaaaaagacatgattatatttaattgaatttacaatttattctattaattatctttctaattacacttgataaaaatacaagaaataaaataaattataataaaaaataatatttttctcttaataaataaataaaattttcaaataacagttatcttcaaacaaagaaatcagactttactatttttccagtatttgcaattcatt

SEQ ID NO: 1532 - DNA, 18 bp, Glycine max
agccctctccgacaagta

SEQ ID NO: 1533 - DNA, 18 bp, Glycine max
ggtgaagcattcttggaa

SEQ ID NO: 1534 - DNA, 18 bp, Glycine max
aaggccttgctttggtat

SEQ ID NO: 1535 - DNA, 21 bp, Glycine max
acatcagaaagatgtgtggtt

SEQ ID NO: 1536 - DNA, 18 bp, Glycine max
ccggccataacaataaga

SEQ ID NO: 1537 - DNA, 22 bp, Glycine max
aaacagagaggaattaattgag

SEQ ID NO: 1538 - DNA, 20 bp, Glycine max
tgcacaatattcatttcgtt

SEQ ID NO: 1539 - DNA, 20 bp, Glycine max
tgttcaacgatgaatcaact

SEQ ID NO: 1540 - DNA, 21 bp, Glycine max
tcaaaccattcaagtttcact

SEQ ID NO: 1541 - DNA, 23 bp, Glycine max
agatgattattatgcattcattt

SEQ ID NO: 1542 - DNA, 19 bp, Glycine max
gaaatgtacgtgtgccaaa

SEQ ID NO: 1543 - DNA, 18 bp, Glycine max
ggccgcatttatatgttt

SEQ ID NO: 1544 - DNA, 18 bp, Glycine max
atataaatgcggccaatg

SEQ ID NO: 1545 - DNA, 24 bp, Glycine max
aatgcatgtgtcttactaaagatt

SEQ ID NO: 1546 - DNA, 19 bp, Glycine max
ttcacaaagttcccttaaa

SEQ ID NO: 1547 - DNA, 18 bp, Glycine max
aacgattgggctgaattt

SEQ ID NO: 1548 - DNA, 23 bp, Glycine max
tggtgttagacaataacaaatga

SEQ ID NO: 1549 - DNA, 21 bp, Glycine max
tttggataaatttgaaaggaa

SEQ ID NO: 1550 - DNA, 20 bp, Glycine max
ttcaagtatcccaatgacaa

SEQ ID NO: 1551 - DNA, 24 bp, Glycine max
aaatctcctaatttgattcttaca

SEQ ID NO: 1552 - DNA, 19 bp, Glycine max
cggcagttcattagaaaca

SEQ ID NO: 1553 - DNA, 21 bp, Glycine max
tggatctcatcatctcacttt

SEQ ID NO: 1554 - DNA, 21 bp, Glycine max
gatgtcttacgaggtgatgtc

SEQ ID NO: 1555 - DNA, 21 bp, Glycine max
catctgcttgcaagatattta

SEQ ID NO: 1556 - DNA, 18 bp, Glycine max
gcatcaattaacccacca

SEQ ID NO: 1557 - DNA, 24 bp, Glycine max
aagagtaacatactgcatcacttt

SEQ ID NO: 1558 - DNA, 19 bp, Glycine max
ttgggtttagcaatcttcc

SEQ ID NO: 1559 - DNA, 19 bp, Glycine max
acacccacatcaatgattc

SEQ ID NO: 1560 - DNA, 21 bp, Glycine max
caaatcttgcgtaaatatgaa

SEQ ID NO: 1561 - DNA, 18 bp, Glycine max
tttgaagtgtttgcatcg

SEQ ID NO: 1562 - DNA, 23 bp, Glycine max
tttcacaataatgtttagagaat

SEQ ID NO: 1563 - DNA, 25 bp, Glycine max
aatatagtactctctttatcccaaa

SEQ ID NO: 1564 - DNA, 18 bp, Glycine max
aggacaagaaagcaacga

SEQ ID NO: 1565 - DNA, 22 bp, Glycine max
actgaaatgaatgtctgtgtgt

SEQ ID NO: 1566 - DNA, 19 bp, Glycine max
ggtaatgtggtggtgacaa

SEQ ID NO: 1567 - DNA, 20 bp, Glycine max
tttgaggagttgctttacaa

SEQ ID NO: 1568 - DNA, 20 bp, Glycine max
ttgtaaagcaactcctcaaa

SEQ ID NO: 1569 - DNA, 18 bp, Glycine max
ccacaattctccaccact

SEQ ID NO: 1570 - DNA, 18 bp, Glycine max
ttccacagcatcttggtt

SEQ ID NO: 1571 - DNA, 18 bp, Glycine max
gcatcaatgacctcttgc

SEQ ID NO: 1572 - DNA, 18 bp, Glycine max
gtgcttgtgctccaaatc

SEQ ID NO: 1573 - DNA, 18 bp, Glycine max
ttcctctactcgccaaga

SEQ ID NO: 1574 - DNA, 24 bp, Glycine max
aacattgcttatatttctccttct

SEQ ID NO: 1575 - DNA, 18 bp, Glycine max
atttggtgccacttgatg

SEQ ID NO: 1576 - DNA, 18 bp, Glycine max
tgtagtggcgacaacgat

SEQ ID NO: 1577 - DNA, 18 bp, Glycine max
gtaccgtcctggtcatca

SEQ ID NO: 1578 - DNA, 22 bp, Glycine max
tttgttgatatgacaaccattc

SEQ ID NO: 1579 - DNA, 20 bp, Glycine max
aattggttcagctttgagaa

SEQ ID NO: 1580 - DNA, 18 bp, Glycine max
gccagtgttgaacctgaa

SEQ ID NO: 1581 - DNA, 17 bp, Glycine max
tctgttggctggcattt

SEQ ID NO: 1582 - DNA, 22 bp, Glycine max
ttcaaagaatgtaaactcaagg

SEQ ID NO: 1583 - DNA, 18 bp, Glycine max
agggttgcttgcttcttt

SEQ ID NO: 1584 - DNA, 19 bp, Glycine max
aaacaatcgatccacacat

SEQ ID NO: 1585 - DNA, 18 bp, Glycine max
ttcgattgtgggatcttg

SEQ ID NO: 1586 - DNA, 18 bp, Glycine max
ttcatcggaatcacttgc

SEQ ID NO: 1587 - DNA, 22 bp, Glycine max
tctaagatcaatttcagtcgaa

SEQ ID NO: 1588 - DNA, 18 bp, Glycine max
ctttgtcccttgtttcca

SEQ ID NO: 1589 - DNA, 18 bp, Glycine max
ccagcatcactgataggg

SEQ ID NO: 1590 - DNA, 18 bp, Glycine max
ccacaccaacactggttc

SEQ ID NO: 1591 - DNA, 18 bp, Glycine max
cacaaccatcgctactcc

SEQ ID NO: 1592 - DNA, 20 bp, Glycine max
aagaaattgttcctcaatcg

SEQ ID NO: 1593 - DNA, 21 bp, Glycine max
ttggacccttgtatactttca

SEQ ID NO: 1594 - DNA, 18 bp, Glycine max
ggcgttgttatggtcaag

SEQ ID NO: 1595 - DNA, 18 bp, Glycine max
aatccaacccacctcatt

SEQ ID NO: 1596 - DNA, 18 bp, Glycine max
atgaggtgggttggattt

SEQ ID NO: 1597 - DNA, 18 bp, Glycine max
cacacctcaccttggaaa

SEQ ID NO: 1598 - DNA, 21 bp, Glycine max
tgtgaacatggtataaggaca

SEQ ID NO: 1599 - DNA, 21 bp, Glycine max
aaccactatgccaataaatca

SEQ ID NO: 1600 - DNA, 23 bp, Glycine max
ttctttacactaacagagcatga

SEQ ID NO: 1601 - DNA, 18 bp, Glycine max
ggaatttcctgcttgcat

SEQ ID NO: 1602 - DNA, 17 bp, Glycine max
tccttccaccactctcg

SEQ ID NO: 1603 - DNA, 17 bp, Glycine max
gtcggaaggagctgaaa

SEQ ID NO: 1604 - DNA, 19 bp, Glycine max
tcaggtccctctctctctc

SEQ ID NO: 1605 - DNA, 17 bp, Glycine max
gtcggaaggagctgaaa

SEQ ID NO: 1606 - DNA, 20 bp, Glycine max
tctgatacaggtttgggaat

SEQ ID NO: 1607 - DNA, 21 bp, Glycine max
tcagcaagaagtactcagctc

SEQ ID NO: 1608 - DNA, 21 bp, Glycine max
cttggagctatgagagatgaa

SEQ ID NO: 1609 - DNA, 20 bp, Glycine max
ccaaagtaaacaaagcaatg

SEQ ID NO: 1610 - DNA, 18 bp, Glycine max
agtgcactctacgcctgt

SEQ ID NO: 1611 - DNA, 18 bp, Glycine max
tgctgaattcttgtcgtg

SEQ ID NO: 1612 - DNA, 18 bp, Glycine max
atgagacgaggaccattg

SEQ ID NO: 1613 - DNA, 20 bp, Glycine max
tgtcacacatcctcactgat

SEQ ID NO: 1614 - DNA, 18 bp, Glycine max
gggcatgaattaaagctg

SEQ ID NO: 1615 - DNA, 18 bp, Glycine max
ggatgcaattgctttgtc

SEQ ID NO: 1616 - DNA, 19 bp, Glycine max
ttggaggaaatatgggtgt

SEQ ID NO: 1617 - DNA, 18 bp, Glycine max
tgcgtatttggcacatct

SEQ ID NO: 1618 - DNA, 19 bp, Glycine max
gctgccaattcattgtaaa

SEQ ID NO: 1619 - DNA, 18 bp, Glycine max
tgtgcgaatgtgtgtgtt

SEQ ID NO: 1620 - DNA, 18 bp, Glycine max
tgccaagcgagagttatg

SEQ ID NO: 1621 - DNA, 20 bp, Glycine max
tgtcattgaactcttcaaca

SEQ ID NO: 1622 - DNA, 19 bp, Glycine max
gaacaaacgcatctgtctt

SEQ ID NO: 1623 - DNA, 24 bp, Glycine max
gagaattaagtaatgtttgggtta

SEQ ID NO: 1624 - DNA, 18 bp, Glycine max
agaaggactcatggatgc

SEQ ID NO: 1625 - DNA, 18 bp, Glycine max
gtggccaattgttgtgtt

SEQ ID NO: 1626 - DNA, 18 bp, Glycine max
gggtcccgttaccttaaa

SEQ ID NO: 1627 - DNA, 18 bp, Glycine max
tggcattgctcctctagt

SEQ ID NO: 1628 - DNA, 18 bp, Glycine max
tgtttgccagcctgtaat

SEQ ID NO: 1629 - DNA, 19 bp, Glycine max
tcaaagctcgagatcatca

SEQ ID NO: 1630 - DNA, 20 bp, Glycine max
tctttcaagttcttgggtgt

SEQ ID NO: 1631 - DNA, 19 bp, Glycine max
tgcacaacaagaaacctct

SEQ ID NO: 1632 - DNA, 18 bp, Glycine max
tcatgaccaatggagaca

SEQ ID NO: 1633 - DNA, 20 bp, Glycine max
agatttgcaaacatttaccc

SEQ ID NO: 1634 - DNA, 17 bp, Glycine max
ccttcccacactttggt

SEQ ID NO: 1635 - DNA, 23 bp, Glycine max
agcatatataagtgcttggtgtt

SEQ ID NO: 1636 - DNA, 20 bp, Glycine max
aatatgcggtgtctacaaca

SEQ ID NO: 1637 - DNA, 21 bp, Glycine max
aaaggcaaatacttattggtt

SEQ ID NO: 1638 - DNA, 25 bp, Glycine max
aaggatgaaatgtgtaatttagttt

SEQ ID NO: 1639 - DNA, 20 bp, Glycine max
cagaggctctaacaggagaa

SEQ ID NO: 1640 - DNA, 19 bp, Glycine max
tttggtctcgttaatgttt

SEQ ID NO: 1641 - DNA, 24 bp, Glycine max
tttattatatgtcattggattgaa

SEQ ID NO: 1642 - DNA, 18 bp, Glycine max
cccacatcctgtctctca

SEQ ID NO: 1643 - DNA, 19 bp, Glycine max
ttgcattgtaacggtagga

SEQ ID NO: 1644 - DNA, 18 bp, Glycine max
tgagcttcatttgccatt

SEQ ID NO: 1645 - DNA, 24 bp, Glycine max
aaatttcctattagatactttcct

SEQ ID NO: 1646 - DNA, 19 bp, Glycine max
aaatgcactcacagaagca

SEQ ID NO: 1647 - DNA, 25 bp, Glycine max
tgaagtaacaaagataaataaagaa

SEQ ID NO: 1648 - DNA, 17 bp, Glycine max
agcacgtttgggagaaa

SEQ ID NO: 1649 - DNA, 18 bp, Glycine max
tataaggaccacgccaga

SEQ ID NO: 1650 - DNA, 18 bp, Glycine max
tccattcgttcaccattc

SEQ ID NO: 1651 - DNA, 18 bp, Glycine max
tccgtagcagtcatggtt

SEQ ID NO: 1652 - DNA, 24 bp, Glycine max
aatttaccctgacattatatcaaa

SEQ ID NO: 1653 - DNA, 18 bp, Glycine max
atggcctgggtaacttgt

SEQ ID NO: 1654 - DNA, 24 bp, Glycine max
aatttaccctgacattatatcaaa

SEQ ID NO: 1655 - DNA, 18 bp, Glycine max
atggcctgggtaacttgt

SEQ ID NO: 1656 - DNA, 18 bp, Glycine max
ctcagccaagcaaatgac

SEQ ID NO: 1657 - DNA, 18 bp, Glycine max
aaaggaaatggtggcttt

SEQ ID NO: 1658 - DNA, 19 bp, Glycine max
aaacaaagcacctaaacca

SEQ ID NO: 1659 - DNA, 25 bp, Glycine max
aaataggaagggtatctactataaa

SEQ ID NO: 1660 - DNA, 18 bp, Glycine max
ccatgatggagtggagac

SEQ ID NO: 1661 - DNA, 18 bp, Glycine max
ggcaacatgtccatctca

SEQ ID NO: 1662 - DNA, 18 bp, Glycine max
agcaaccatcattggaaa

SEQ ID NO: 1663 - DNA, 20 bp, Glycine max
gcataaatgaatctcgcact

SEQ ID NO: 1664 - DNA, 18 bp, Glycine max
cttggttgtcatggagga

SEQ ID NO: 1665 - DNA, 19 bp, Glycine max
cgcacaagtttagtgaagc

SEQ ID NO: 1666 - DNA, 19 bp, Glycine max
tggactcataccctctcct

SEQ ID NO: 1667 - DNA, 18 bp, Glycine max
ttgtggaggttcaaggaa

SEQ ID NO: 1668 - DNA, 18 bp, Glycine max
ccatggagttcaatgtca

SEQ ID NO: 1669 - DNA, 19 bp, Glycine max
tcaaaccaatgactctcca

SEQ ID NO: 1670 - DNA, 18 bp, Glycine max
cggagctacatcaatgct

SEQ ID NO: 1671 - DNA, 18 bp, Glycine max
aaggatcggacaaggaag

SEQ ID NO: 1672 - DNA, 18 bp, Glycine max
cggtgtggatgtgagatt

SEQ ID NO: 1673 - DNA, 18 bp, Glycine max
ggttgggtgctttctctt

SEQ ID NO: 1674 - DNA, 18 bp, Glycine max
tttggcaagtgtatttcc

SEQ ID NO: 1675 - DNA, 18 bp, Glycine max
tatggtcctacgggaggt

SEQ ID NO: 1676 - DNA, 18 bp, Glycine max
tctgggcttcaattcgta

SEQ ID NO: 1677 - DNA, 18 bp, Glycine max
gcattggtaagcaaagtt

SEQ ID NO: 1678 - DNA, 18 bp, Glycine max
tagacgggaaggtgatga

SEQ ID NO: 1679 - DNA, 18 bp, Glycine max
tcatccgatcatttcgat

SEQ ID NO: 1680 - DNA, 23 bp, Glycine max
acattcacatttgattgattgta

SEQ ID NO: 1681 - DNA, 18 bp, Glycine max
tcatccgatcatttcgat

SEQ ID NO: 1682 - DNA, 18 bp, Glycine max
aaacgagtcataccgaca

SEQ ID NO: 1683 - DNA, 18 bp, Glycine max
ctacgtacgcggcataat

SEQ ID NO: 1684 - DNA, 18 bp, Glycine max
gtatttagcggcaagcaa

SEQ ID NO: 1685 - DNA, 18 bp, Glycine max
cacttcactcccaacgac

SEQ ID NO: 1686 - DNA, 18 bp, Glycine max
caattggcgaatctgaat

SEQ ID NO: 1687 - DNA, 18 bp, Glycine max
ggccaaagtcgtgagaat

SEQ ID NO: 1688 - DNA, 18 bp, Glycine max
caattggcgaatctgaat

SEQ ID NO: 1689 - DNA, 18 bp, Glycine max
ggccaaagtcgtgagaat

SEQ ID NO: 1690 - DNA, 18 bp, Glycine max
ttggcatggcactataaa

SEQ ID NO: 1691 - DNA, 19 bp, Glycine max
gtgccatcaaccatacatt

SEQ ID NO: 1692 - DNA, 19 bp, Glycine max
tcccactcctaattcttgc

SEQ ID NO: 1693 - DNA, 18 bp, Glycine max
tgtgaggcaggaactctc

SEQ ID NO: 1694 - DNA, 21 bp, Glycine max
aacactgaacaaccatttaag

SEQ ID NO: 1695 - DNA, 21 bp, Glycine max
tggcatttatagtaccgtctt

SEQ ID NO: 1696 - DNA, 21 bp, Glycine max
aaattcagcaaattaagatca

SEQ ID NO: 1697 - DNA, 20 bp, Glycine max
tgcaatttcatacttacaca

SEQ ID NO: 1698 - DNA, 25 bp, Glycine max
tgtgtaaatcactactcactttaat

SEQ ID NO: 1699 - DNA, 18 bp, Glycine max
tgagaaacggaaaggtca

SEQ ID NO: 1700 - DNA, 18 bp, Glycine max
tgacctttccgtttctca

SEQ ID NO: 1701 - DNA, 19 bp, Glycine max
tgacatttcttccgtgaaa

SEQ ID NO: 1702 - DNA, 18 bp, Glycine max
tgacctttccgtttctca

SEQ ID NO: 1703 - DNA, 19 bp, Glycine max
tgacatttcttccgtgaaa

SEQ ID NO: 1704 - DNA, 20 bp, Glycine max
tgccaacctttaagaatacc

SEQ ID NO: 1705 - DNA, 20 bp, Glycine max
aaactagcattcccaaacaa

SEQ ID NO: 1706 - DNA, 19 bp, Glycine max
aggttaagtgtgccgctat

SEQ ID NO: 1707 - DNA, 18 bp, Glycine max
tcgtcacccaccataaac

SEQ ID NO: 1708 - DNA, 24 bp, Glycine max
aaactaccattcatttatgtcatt

SEQ ID NO: 1709 - DNA, 20 bp, Glycine max
ttcaatctcaatctccatcc

SEQ ID NO: 1710 - DNA, 18 bp, Glycine max
ggaggatggctttgagtt

SEQ ID NO: 1711 - DNA, 18 bp, Glycine max
atccaaacctcggagaac

SEQ ID NO: 1712 - DNA, 21 bp, Glycine max
aaatttatcaatcgtcacaaa

SEQ ID NO: 1713 - DNA, 18 bp, Glycine max
ccgtttcagaggctaaca

SEQ ID NO: 1714 - DNA, 18 bp, Glycine max
agcctctgaaacggaaat

SEQ ID NO: 1715 - DNA, 18 bp, Glycine max
aggttgagttgggaccac

SEQ ID NO: 1716 - DNA, 21 bp, Glycine max
agcacaactccaactttattg

SEQ ID NO: 1717 - DNA, 22 bp, Glycine max
agcgtacatagtcacttacagc

SEQ ID NO: 1718 - DNA, 19 bp, Glycine max
acattcaccaagaaggaaa

SEQ ID NO: 1719 - DNA, 20 bp, Glycine max
agagacccaacaagaaacaa

SEQ ID NO: 1720 - DNA, 20 bp, Glycine max
tttgatttagcaaacacatt

SEQ ID NO: 1721 - DNA, 18 bp, Glycine max
agctctgccatcaaatca

SEQ ID NO: 1722 - DNA, 24 bp, Glycine max
aattaagaataaccattgatcttt

SEQ ID NO: 1723 - DNA, 18 bp, Glycine max
cacgggagtttggagata

SEQ ID NO: 1724 - DNA, 17 bp, Glycine max
gtgacgcggctatcttc

SEQ ID NO: 1725 - DNA, 18 bp, Glycine max
cataagagcccttgtgga

SEQ ID NO: 1726 - DNA, 18 bp, Glycine max
gttcttgggaagggtcag

SEQ ID NO: 1727 - DNA, 18 bp, Glycine max
tggcatcttctgatccaa

SEQ ID NO: 1728 - DNA, 19 bp, Glycine max
ttgacccaacattctgttt

SEQ ID NO: 1729 - DNA, 20 bp, Glycine max
catgatcatttccatcacaa

SEQ ID NO: 1730 - DNA, 17 bp, Glycine max
aactccgtcctgtgtgg

SEQ ID NO: 1731 - DNA, 18 bp, Glycine max
ggtgagtgatgagcatgg

SEQ ID NO: 1732 - DNA, 18 bp, Glycine max
tggactcaggatgctgtt

SEQ ID NO: 1733 - DNA, 19 bp, Glycine max
gcaggtttaagaggatgga

SEQ ID NO: 1734 - DNA, 18 bp, Glycine max
acccttccctacaccaag

SEQ ID NO: 1735 - DNA, 19 bp, Glycine max
gggtcttgcattcataaca

SEQ ID NO: 1736 - DNA, 18 bp, Glycine max
ggaaatgccgtgtactca

SEQ ID NO: 1737 - DNA, 17 bp, Glycine max
ggcctttgttgaccaga

SEQ ID NO: 1738 - DNA, 21 bp, Glycine max
tgtcaaataggtgggtatgtt

SEQ ID NO: 1739 - DNA, 18 bp, Glycine max
cactgggcctactgtttg

SEQ ID NO: 1740 - DNA, 18 bp, Glycine max
ctttaacaccagccctca

SEQ ID NO: 1741 - DNA, 18 bp, Glycine max
gcccttcatcaaatcaca

SEQ ID NO: 1742 - DNA, 18 bp, Glycine max
ctttaacaccagccctca

SEQ ID NO: 1743 - DNA, 18 bp, Glycine max
gcccttcatcaaatcaca

SEQ ID NO: 1744 - DNA, 18 bp, Glycine max
tttgcacccaacttgact

SEQ ID NO: 1745 - DNA, 18 bp, Glycine max
ggtggagtcaacaaccaa

SEQ ID NO: 1746 - DNA, 21 bp, Glycine max
aagatatgtggtgaagagaaa

SEQ ID NO: 1747 - DNA, 18 bp, Glycine max
ggaacatggctttgaatg

SEQ ID NO: 1748 - DNA, 21 bp, Glycine max
gagaatctgatttgagccata

SEQ ID NO: 1749 - DNA, 19 bp, Glycine max
ttggtacgagggtaatgaa

SEQ ID NO: 1750 - DNA, 19 bp, Glycine max
accctcgtaccaatgattt

SEQ ID NO: 1751 - DNA, 21 bp, Glycine max
tttccaaactatccactcaaa

SEQ ID NO: 1752 - DNA, 19 bp, Glycine max
accctcgtaccaatgattt

SEQ ID NO: 1753 - DNA, 21 bp, Glycine max
tttccaaactatccactcaaa

SEQ ID NO: 1754 - DNA, 18 bp, Glycine max
tttccttcgatcacaagc

SEQ ID NO: 1755 - DNA, 18 bp, Glycine max
gaaagaaccgctgtcaaa

SEQ ID NO: 1756 - DNA, 18 bp, Glycine max
tttgacagcggttctttc

SEQ ID NO: 1757 - DNA, 18 bp, Glycine max
agcaagctcatccacaac

SEQ ID NO: 1758 - DNA, 18 bp, Glycine max
ctggtttctcagcagtgg

SEQ ID NO: 1759 - DNA, 18 bp, Glycine max
tgagatcttctcccacca

SEQ ID NO: 1760 - DNA, 24 bp, Glycine max
gtctagtttagatagtggaagtgg

SEQ ID NO: 1761 - DNA, 19 bp, Glycine max
ttgtgaatgaatgttgtgg

SEQ ID NO: 1762 - DNA, 18 bp, Glycine max
tacgcgagagggtgtaga

SEQ ID NO: 1763 - DNA, 18 bp, Glycine max
gtagtgctccacgaatgc

SEQ ID NO: 1764 - DNA, 18 bp, Glycine max
ccctgccatgaaacaata

SEQ ID NO: 1765 - DNA, 20 bp, Glycine max
acagaatcagccttcaatgt

SEQ ID NO: 1766 - DNA, 18 bp, Glycine max
agatttccaggtcgaagc

SEQ ID NO: 1767 - DNA, 17 bp, Glycine max
ggcggctaagaaagaca

SEQ ID NO: 1768 - DNA, 18 bp, Glycine max
aagagcggaattgaaacc

SEQ ID NO: 1769 - DNA, 17 bp, Glycine max
ggcggctaagaaagaca

SEQ ID NO: 1770 - DNA, 21 bp, Glycine max
ttcacatgtttgttgaatgaa

SEQ ID NO: 1771 - DNA, 18 bp, Glycine max
caatcaccggtcacattt

SEQ ID NO: 1772 - DNA, 19 bp, Glycine max
tgcagaaagatggaaatga

SEQ ID NO: 1773 - DNA, 18 bp, Glycine max
atcctaacgtcacgcatc

SEQ ID NO: 1774 - DNA, 23 bp, Glycine max
ggattaacagaaatacagaatgc

SEQ ID NO: 1775 - DNA, 19 bp, Glycine max
tgtccagaattggataggg

SEQ ID NO: 1776 - DNA, 23 bp, Glycine max
ttgaaactttagtgtcatgtgtc

SEQ ID NO: 1777 - DNA, 20 bp, Glycine max
tcttgagtatggcaattgaa

SEQ ID NO: 1778 - DNA, 17 bp, Glycine max
acgctgaaccagaccag

SEQ ID NO: 1779 - DNA, 18 bp, Glycine max
agaactgtcgcttggaaa

SEQ ID NO: 1780 - DNA, 18 bp, Glycine max
cggaattgcaccaattat

SEQ ID NO: 1781 - DNA, 18 bp, Glycine max
cattatggcggaagttga

SEQ ID NO: 1782 - DNA, 18 bp, Glycine max
cgattcgctttatctcca

SEQ ID NO: 1783 - DNA, 18 bp, Glycine max
ttctcgctgctaagtgct

SEQ ID NO: 1784 - DNA, 25 bp, Glycine max
atataacatttatccatcttaactt

SEQ ID NO: 1785 - DNA, 22 bp, Glycine max
ggatgctcataaatagatcaaa

SEQ ID NO: 1786 - DNA, 19 bp, Glycine max
cctagagtcgtggtagcaa

SEQ ID NO: 1787 - DNA, 19 bp, Glycine max
tgtccaggtcactaaggaa

SEQ ID NO: 1788 - DNA, 18 bp, Glycine max
tgcagcttgctatcactg

SEQ ID NO: 1789 - DNA, 19 bp, Glycine max
caatgtgattgagctttgg

SEQ ID NO: 1790 - DNA, 18 bp, Glycine max
atctgtttgacggagcag

SEQ ID NO: 1791 - DNA, 21 bp, Glycine max
ttaggtgagtcttgagctttc

SEQ ID NO: 1792 - DNA, 20 bp, Glycine max
caaacagcaaatatcaaacg

SEQ ID NO: 1793 - DNA, 18 bp, Glycine max
ttctgcagcagttcaagg

SEQ ID NO: 1794 - DNA, 19 bp, Glycine max
cactcttcctcttcccatt

SEQ ID NO: 1795 - DNA, 19 bp, Glycine max
acagggtttggtttattcc

SEQ ID NO: 1796 - DNA, 18 bp, Glycine max
gctcgctactgcgtgtat

SEQ ID NO: 1797 - DNA, 19 bp, Glycine max
tcattgacaccatctctcg

SEQ ID NO: 1798 - DNA, 18 bp, Glycine max
tagccacgagagatggtg

SEQ ID NO: 1799 - DNA, 18 bp, Glycine max
ttgcattagggcattgat

SEQ ID NO: 1800 - DNA, 18 bp, Glycine max
tgaattggcgttgaaagt

SEQ ID NO: 1801 - DNA, 23 bp, Glycine max
tgtaaaggtataagcctaacaaa

SEQ ID NO: 1802 - DNA, 19 bp, Glycine max
accattgtccatcctctct

SEQ ID NO: 1803 - DNA, 18 bp, Glycine max
tttgtctgcggttatgct

SEQ ID NO: 1804 - DNA, 18 bp, Glycine max
atgccaccatctcaacac

SEQ ID NO: 1805 - DNA, 18 bp, Glycine max
accaaagccaacaccttt

SEQ ID NO: 1806 - DNA, 18 bp, Glycine max
tcccaacgcaacagtaac

SEQ ID NO: 1807 - DNA, 20 bp, Glycine max
aaacttatgcatgagagaaa

SEQ ID NO: 1808 - DNA, 18 bp, Glycine max
gaaagcattgaccaagga

SEQ ID NO: 1809 - DNA, 19 bp, Glycine max
cccatcttaacccacaatc

SEQ ID NO: 1810 - DNA, 18 bp, Glycine max
gtcgcagcaagagttgac

SEQ ID NO: 1811 - DNA, 18 bp, Glycine max
catacctcgtgcaagacc

SEQ ID NO: 1812 - DNA, 20 bp, Glycine max
ttggtacaatctcagggact

SEQ ID NO: 1813 - DNA, 21 bp, Glycine max
aacggtatgactttgaagttg

SEQ ID NO: 1814 - DNA, 20 bp, Glycine max
ttggtacaatctcagggact

SEQ ID NO: 1815 - DNA, 21 bp, Glycine max
aacggtatgactttgaagttg

SEQ ID NO: 1816 - DNA, 20 bp, Glycine max
acaacttcaaagtcataccg

SEQ ID NO: 1817 - DNA, 18 bp, Glycine max
atctcttgtgcaccacca

SEQ ID NO: 1818 - DNA, 18 bp, Glycine max
gtccctgtcactgcaatc

SEQ ID NO: 1819 - DNA, 19 bp, Glycine max
tcgattgggagttagcttt

SEQ ID NO: 1820 - DNA, 19 bp, Glycine max
agcagaaatttgaaagaaa

SEQ ID NO: 1821 - DNA, 25 bp, Glycine max
tgtcattgaactacataaagaagag

SEQ ID NO: 1822 - DNA, 18 bp, Glycine max
aagctgatgtggtttcca

SEQ ID NO: 1823 - DNA, 20 bp, Glycine max
tgacatgagaatgtaaccaa

SEQ ID NO: 1824 - DNA, 18 bp, Glycine max
gagtcctttggccttgtt

SEQ ID NO: 1825 - DNA, 17 bp, Glycine max
cgacacggtacgaggtt

SEQ ID NO: 1826 - DNA, 21 bp, Glycine max
ggataattagtcttggccatc

SEQ ID NO: 1827 - DNA, 18 bp, Glycine max
ctccgaaagttggaggtt

SEQ ID NO: 1828 - DNA, 18 bp, Glycine max
ttctctgtccacctctgc

SEQ ID NO: 1829 - DNA, 18 bp, Glycine max
tcgagttgagaagggtca

SEQ ID NO: 1830 - DNA, 18 bp, Glycine max
ggcttcggagtaaggaag

SEQ ID NO: 1831 - DNA, 18 bp, Glycine max
tcctccagtttgtgttca

SEQ ID NO: 1832 - DNA, 18 bp, Glycine max
cacttcctcgaacgtcac

SEQ ID NO: 1833 - DNA, 17 bp, Glycine max
aggatctagggcggttc

SEQ ID NO: 1834 - DNA, 18 bp, Glycine max
aattgtacggcagacacg

SEQ ID NO: 1835 - DNA, 18 bp, Glycine max
atcaccatcctcatgtcg

SEQ ID NO: 1836 - DNA, 18 bp, Glycine max
ttggatgaaattgcaggt

SEQ ID NO: 1837 - DNA, 18 bp, Glycine max
aggaaacgatgcaaacaa

SEQ ID NO: 1838 - DNA, 21 bp, Glycine max
ctcaaacctccaatcactaaa

SEQ ID NO: 1839 - DNA, 18 bp, Glycine max
aggctaggccaaggtaca

SEQ ID NO: 1840 - DNA, 19 bp, Glycine max
ttgtcaagatggttccaga

SEQ ID NO: 1841 - DNA, 18 bp, Glycine max
cttcattgtcggatcgtt

SEQ ID NO: 1842 - DNA, 18 bp, Glycine max
tgcagcaacatatctgga

SEQ ID NO: 1843 - DNA, 18 bp, Glycine max
cattatgtgcccaggttt

SEQ ID NO: 1844 - DNA, 18 bp, Glycine max
gccctccgaagaaacata

SEQ ID NO: 1845 - DNA, 18 bp, Glycine max
gaacaagccaattccaaa

SEQ ID NO: 1846 - DNA, 18 bp, Glycine max
acgcaagcttcactcatc

SEQ ID NO: 1847 - DNA, 21 bp, Glycine max
aaacccatattgaagatttga

SEQ ID NO: 1848 - DNA, 18 bp, Glycine max
ttgcctagtttggtgacg

SEQ ID NO: 1849 - DNA, 19 bp, Glycine max
aatgtgcattggtctcaaa

SEQ ID NO: 1850 - DNA, 18 bp, Glycine max
accggtgacccaatctat

SEQ ID NO: 1851 - DNA, 18 bp, Glycine max
tttgcataatgcgtccta

SEQ ID NO: 1852 - DNA, 17 bp, Glycine max
ggccgcaagtactacca

SEQ ID NO: 1853 - DNA, 17 bp, Glycine max
cacggcctctttgactc

SEQ ID NO: 1854 - DNA, 18 bp, Glycine max
ccatgttctccacaagga

SEQ ID NO: 1855 - DNA, 18 bp, Glycine max
tgctgatgtttcctccat

SEQ ID NO: 1856 - DNA, 20 bp, Glycine max
aatggaatatggaaaggaaa

SEQ ID NO: 1857 - DNA, 18 bp, Glycine max
ctcacactgcaggtgctt

SEQ ID NO: 1858 - DNA, 18 bp, Glycine max
gcacctgcagtgtgagtt

SEQ ID NO: 1859 - DNA, 18 bp, Glycine max
aaccctccctctgttctg

SEQ ID NO: 1860 - DNA, 18 bp, Glycine max
agaacagagggagggttg

SEQ ID NO: 1861 - DNA, 18 bp, Glycine max
tgttcttccaaaccagga

SEQ ID NO: 1862 - DNA, 19 bp, Glycine max
accgtgaagatgatcaaga

SEQ ID NO: 1863 - DNA, 19 bp, Glycine max
cccaaacaacaattcctct

SEQ ID NO: 1864 - DNA, 18 bp, Glycine max
cgttgctttgaacaaggt

SEQ ID NO: 1865 - DNA, 18 bp, Glycine max
tgaaacacctggaggaga

SEQ ID NO: 1866 - DNA, 18 bp, Glycine max
tgcatgcatgtaaccaga

SEQ ID NO: 1867 - DNA, 18 bp, Glycine max
aatttggacggacgtaaa

SEQ ID NO: 1868 - DNA, 18 bp, Glycine max
tgcatgcatgtaaccaga

SEQ ID NO: 1869 - DNA, 23 bp, Glycine max
caaagtacactgaataggtgttg

SEQ ID NO: 1870 - DNA, 18 bp, Glycine max
tgccatttgatgaggaat

SEQ ID NO: 1871 - DNA, 18 bp, Glycine max
aattggttggtcacgatg

SEQ ID NO: 1872 - DNA, 18 bp, Glycine max
gcccaagttattgctcct

SEQ ID NO: 1873 - DNA, 18 bp, Glycine max
tgtgagggaatgtgttca

SEQ ID NO: 1874 - DNA, 22 bp, Glycine max
tgattagtttctttccttctcc

SEQ ID NO: 1875 - DNA, 21 bp, Glycine max
tctttcatcaagaatcaatgc

SEQ ID NO: 1876 - DNA, 18 bp, Glycine max
ttggcctgaataatttgc

SEQ ID NO: 1877 - DNA, 18 bp, Glycine max
ggtgggaagtgggatagt

SEQ ID NO: 1878 - DNA, 18 bp, Glycine max
cctcggccaaacataact

SEQ ID NO: 1879 - DNA, 19 bp, Glycine max
tgcaaacaacaaacaatca

SEQ ID NO: 1880 - DNA, 19 bp, Glycine max
ttggacactgtgagaggtg

SEQ ID NO: 1881 - DNA, 20 bp, Glycine max
tccatgattctattcgacct

SEQ ID NO: 1882 - DNA, 18 bp, Glycine max
ctcagaagcattggttgc

SEQ ID NO: 1883 - DNA, 18 bp, Glycine max
acgttgttgctgacctgt

SEQ ID NO: 1884 - DNA, 18 bp, Glycine max
tttgttggctctccttga

SEQ ID NO: 1885 - DNA, 18 bp, Glycine max
ggtcctttccatccaaga

SEQ ID NO: 1886 - DNA, 20 bp, Glycine max
agcctgtttcaacctgtaaa

SEQ ID NO: 1887 - DNA, 23 bp, Glycine max
aaatattagaacgaggtaggact

SEQ ID NO: 1888 - DNA, 18 bp, Glycine max
gaaattgcacgtgggtta

SEQ ID NO: 1889 - DNA, 18 bp, Glycine max
cccacttctccaattcct

SEQ ID NO: 1890 - DNA, 20 bp, Glycine max
tccctacttgattgagggta

SEQ ID NO: 1891 - DNA, 18 bp, Glycine max
aacagaacccaaatctgc

SEQ ID NO: 1892 - DNA, 22 bp, Glycine max
aaacatgattagtcttgacaca

SEQ ID NO: 1893 - DNA, 18 bp, Glycine max
caagatgcaagcaccata

SEQ ID NO: 1894 - DNA, 22 bp, Glycine max
tgaaataaacatgtacgacaca

SEQ ID NO: 1895 - DNA, 18 bp, Glycine max
tttatgtgtgctgccaaa

SEQ ID NO: 1896 - DNA, 18 bp, Glycine max
ccaacccaagttcaacac

SEQ ID NO: 1897 - DNA, 18 bp, Glycine max
tcgtgaggagaaggaaga

SEQ ID NO: 1898 - DNA, 18 bp, Glycine max
ttggtcggtgtacctgat

SEQ ID NO: 1899 - DNA, 18 bp, Glycine max
atggcacatgcgataaat

SEQ ID NO: 1900 - DNA, 18 bp, Glycine max
tgagttggatgaggtggt

SEQ ID NO: 1901 - DNA, 18 bp, Glycine max
ttcaagtggtgcttcctc

SEQ ID NO: 1902 - DNA, 21 bp, Glycine max
tggagtaaggtcttgtttgaa

SEQ ID NO: 1903 - DNA, 18 bp, Glycine max
gcaattgacagatgctga

SEQ ID NO: 1904 - DNA, 18 bp, Glycine max
acaagcaagccttccaat

SEQ ID NO: 1905 - DNA, 18 bp, Glycine max
tgtgttgagcaaatgtcc

SEQ ID NO: 1906 - DNA, 18 bp, Glycine max
acaagcaagccttccaat

SEQ ID NO: 1907 - DNA, 18 bp, Glycine max
tgtgttgagcaaatgtcc

SEQ ID NO: 1908 - DNA, 20 bp, Glycine max
tcagaaatggagatgcataa

SEQ ID NO: 1909 - DNA, 18 bp, Glycine max
taagcttgcaggacaagg

SEQ ID NO: 1910 - DNA, 18 bp, Glycine max
acggttatgcgatcagtt

SEQ ID NO: 1911 - DNA, 19 bp, Glycine max
tcgttgcttatgtcttgga

SEQ ID NO: 1912 - DNA, 22 bp, Glycine max
cattgttccattgagtacactt

SEQ ID NO: 1913 - DNA, 19 bp, Glycine max
aatggaagatgatgatgga

SEQ ID NO: 1914 - DNA, 21 bp, Glycine max
ttcatcatctgcttcttcttt

SEQ ID NO: 1915 - DNA, 18 bp, Glycine max
atgttgcgttggttcatc

SEQ ID NO: 1916 - DNA, 18 bp, Glycine max
gaagacttggtgcagctt

SEQ ID NO: 1917 - DNA, 18 bp, Glycine max
cttcctgttcctgcattg

SEQ ID NO: 1918 - DNA, 19 bp, Glycine max
aaacagccactttggattt

SEQ ID NO: 1919 - DNA, 20 bp, Glycine max
aaaccgatgtcttacaccag

SEQ ID NO: 1920 - DNA, 18 bp, Glycine max
ttgggattcctggttctt

SEQ ID NO: 1921 - DNA, 18 bp, Glycine max
ggttgaagctgcacaaac

SEQ ID NO: 1922 - DNA, 18 bp, Glycine max
gccactcccgtatattcc

SEQ ID NO: 1923 - DNA, 18 bp, Glycine max
agagcaggaagaggcact

SEQ ID NO: 1924 - DNA, 18 bp, Glycine max
cccagcttgttctgtgaa

SEQ ID NO: 1925 - DNA, 18 bp, Glycine max
accgatgcgaaagttgta

SEQ ID NO: 1926 - DNA, 18 bp, Glycine max
cccagcttgttctgtgaa

SEQ ID NO: 1927 - DNA, 18 bp, Glycine max
accgatgcgaaagttgta

SEQ ID NO: 1928 - DNA, 18 bp, Glycine max
ttcgcatcggttacattt

SEQ ID NO: 1929 - DNA, 19 bp, Glycine max
tcaggagagggtttaggaa

SEQ ID NO: 1930 - DNA, 18 bp, Glycine max
ttcgcatcggttacattt

SEQ ID NO: 1931 - DNA, 19 bp, Glycine max
tcaggagagggtttaggaa

SEQ ID NO: 1932 - DNA, 19 bp, Glycine max
tcctcctcctagttgtgct

SEQ ID NO: 1933 - DNA, 18 bp, Glycine max
tgctgaccgcaatctaat

SEQ ID NO: 1934 - DNA, 21 bp, Glycine max
ggtaatgaatcagatcaacga

SEQ ID NO: 1935 - DNA, 18 bp, Glycine max
aaccgattgcaaactcaa

SEQ ID NO: 1936 - DNA, 18 bp, Glycine max
tgcaaatcatgcatccta

SEQ ID NO: 1937 - DNA, 19 bp, Glycine max
tgcacaagtgtatttgcag

SEQ ID NO: 1938 - DNA, 20 bp, Glycine max
tcaaatatttctcccgctac

SEQ ID NO: 1939 - DNA, 18 bp, Glycine max
tatggtcctccgggaata

SEQ ID NO: 1940 - DNA, 18 bp, Glycine max
gcatagcgtcagcgtagt

SEQ ID NO: 1941 - DNA, 18 bp, Glycine max
catttcggaatggaattg

SEQ ID NO: 1942 - DNA, 18 bp, Glycine max
tggatattggcactgagc

SEQ ID NO: 1943 - DNA, 22 bp, Glycine max
tgaagctctctctatctcccta

SEQ ID NO: 1944 - DNA, 20 bp, Glycine max
tcgacatattctttgggatt

SEQ ID NO: 1945 - DNA, 18 bp, Glycine max
ccaatgtgggactgaaga

SEQ ID NO: 1946 - DNA, 18 bp, Glycine max
ttcagcaaacaccgctat

SEQ ID NO: 1947 - DNA, 19 bp, Glycine max
tggtaaagagtggcaacaa

SEQ ID NO: 1948 - DNA, 19 bp, Glycine max
gtactcctggagggtctca

SEQ ID NO: 1949 - DNA, 18 bp, Glycine max
tcctgcaacatcttctcc

SEQ ID NO: 1950 - DNA, 24 bp, Glycine max
ttgtgagaatctatttatttgtcc

SEQ ID NO: 1951 - DNA, 22 bp, Glycine max
tcaggacaatgtttaagagtga

SEQ ID NO: 1952 - DNA, 18 bp, Glycine max
atttgatgaaccgaccaa

SEQ ID NO: 1953 - DNA, 18 bp, Glycine max
gggtgagaccaacacaaa

SEQ ID NO: 1954 - DNA, 18 bp, Glycine max
cttctcgcgtagcttgag

SEQ ID NO: 1955 - DNA, 18 bp, Glycine max
cgggacaaactgcatcta

SEQ ID NO: 1956 - DNA, 18 bp, Glycine max
cagccaaatgcgtaacat

SEQ ID NO: 1957 - DNA, 20 bp, Glycine max
ttgatggttattgttcagga

SEQ ID NO: 1958 - DNA, 18 bp, Glycine max
ccattccacctcaacaaa

SEQ ID NO: 1959 - DNA, 17 bp, Glycine max
gatccatgaacggtgga

SEQ ID NO: 1960 - DNA, 20 bp, Glycine max
caattggaaacaagatctca

SEQ ID NO: 1961 - DNA, 19 bp, Glycine max
catctaagttctgcgatga

SEQ ID NO: 1962 - DNA, 18 bp, Glycine max
tggtccctcaaagaacaa

SEQ ID NO: 1963 - DNA, 18 bp, Glycine max
gccctggtgtttccttat

SEQ ID NO: 1964 - DNA, 20 bp, Glycine max
gcatagcttaaggcatggta

SEQ ID NO: 1965 - DNA, 18 bp, Glycine max
tgtccttcctgcttctca

SEQ ID NO: 1966 - DNA, 18 bp, Glycine max
tgtgtgtgttccacatgc

SEQ ID NO: 1967 - DNA, 18 bp, Glycine max
tcagcaacaccttggaat

SEQ ID NO: 1968 - DNA, 18 bp, Glycine max
ggcgaggattgaagaaat

SEQ ID NO: 1969 - DNA, 25 bp, Glycine max
aagggttgatttaataatttacaga

SEQ ID NO: 1970 - DNA, 18 bp, Glycine max
ggcgaggattgaagaaat

SEQ ID NO: 1971 - DNA, 24 bp, Glycine max
aagggttgatttaataatttacag

SEQ ID NO: 1972 - DNA, 18 bp, Glycine max
ggccactacttggatgaa

SEQ ID NO: 1973 - DNA, 19 bp, Glycine max
ttcagaaggcagaatcaaa

SEQ ID NO: 1974 - DNA, 18 bp, Glycine max
aatagcgtgattggaacc

SEQ ID NO: 1975 - DNA, 25 bp, Glycine max
ttggatgtaacaacttatttgtatt

SEQ ID NO: 1976 - DNA, 19 bp, Glycine max
tgtgtggaatgcacattta

SEQ ID NO: 1977 - DNA, 19 bp, Glycine max
cgcaagatgatgttgattg

SEQ ID NO: 1978 - DNA, 20 bp, Glycine max
gtcgtgtttaagcatttgaa

SEQ ID NO: 1979 - DNA, 18 bp, Glycine max
gaaagccgaaggacatct

SEQ ID NO: 1980 - DNA, 18 bp, Glycine max
ggctttccggataagaga

SEQ ID NO: 1981 - DNA, 19 bp, Glycine max
gcgacagaaatcatgacag

SEQ ID NO: 1982 - DNA, 24 bp, Glycine max
tgttagtctgttacacaaatatcg

SEQ ID NO: 1983 - DNA, 19 bp, Glycine max
gcgacagaaatcatgacag

SEQ ID NO: 1984 - DNA, 17 bp, Glycine max
tagaggaggcggagaca

SEQ ID NO: 1985 - DNA, 19 bp, Glycine max
tctcctctgtcgaatgtca

SEQ ID NO: 1986 - DNA, 20 bp, Glycine max
gttaagttaattggccatgc

SEQ ID NO: 1987 - DNA, 18 bp, Glycine max
ttggttggactttggaga

SEQ ID NO: 1988 - DNA, 19 bp, Glycine max
agctgatgcgttacaacag

SEQ ID NO: 1989 - DNA, 17 bp, Glycine max
tgggtggagagggtgta

SEQ ID NO: 1990 - DNA, 18 bp, Glycine max
gcgtagtcagaggaagca

SEQ ID NO: 1991 - DNA, 18 bp, Glycine max
atgagggtgggaatgaat

SEQ ID NO: 1992 - DNA, 18 bp, Glycine max
atggatgttgcaaagtgg

SEQ ID NO: 1993 - DNA, 18 bp, Glycine max
cagccaattcgttagagg

SEQ ID NO: 1994 - DNA, 20 bp, Glycine max
ttggacttacgtgaaatgaa

SEQ ID NO: 1995 - DNA, 24 bp, Glycine max
cgatgaatatgtatttagctcttg

SEQ ID NO: 1996 - DNA, 20 bp, Glycine max
acgttcaagagctaaataca

SEQ ID NO: 1997 - DNA, 18 bp, Glycine max
ggtcattgaacacggttt

SEQ ID NO: 1998 - DNA, 19 bp, Glycine max
tccacttgtttggtgctaa

SEQ ID NO: 1999 - DNA, 19 bp, Glycine max
tgtggtgtaccgcataact

SEQ ID NO: 2000 - DNA, 21 bp, Glycine max
aaacaaatacctgctgataac

SEQ ID NO: 2001 - DNA, 24 bp, Glycine max
atacttaaattaacgtgttgataa

SEQ ID NO: 2002 - DNA, 23 bp, Glycine max
aaacaaatacctgctgataacat

SEQ ID NO: 2003 - DNA, 18 bp, Glycine max
acccatcaactcgggtat

SEQ ID NO: 2004 - DNA, 17 bp, Glycine max
cccgagttgatgggttt

SEQ ID NO: 2005 - DNA, 18 bp, Glycine max
cagggacaggctctgata

SEQ ID NO: 2006 - DNA, 18 bp, Glycine max
cccaatctaccctccatc

SEQ ID NO: 2007 - DNA, 18 bp, Glycine max
aattagtgcgggaaggac

SEQ ID NO: 2008 - DNA, 18 bp, Glycine max
aaatctcccttcccagaa

SEQ ID NO: 2009 - DNA, 18 bp, Glycine max
cccatcaaaccctacctt

SEQ ID NO: 2010 - DNA, 18 bp, Glycine max
caaggctttggagaacaa

SEQ ID NO: 2011 - DNA, 19 bp, Glycine max
aggtcctcgtactcctcct

SEQ ID NO: 2012 - DNA, 17 bp, Glycine max
gaatccgacagcgactc

SEQ ID NO: 2013 - DNA, 18 bp, Glycine max
accaccacaaaggaggac

SEQ ID NO: 2014 - DNA, 25 bp, Glycine max
tttacacgataattaatgaagagaa

SEQ ID NO: 2015 - DNA, 18 bp, Glycine max
acgggaccaagattgttt

SEQ ID NO: 2016 - DNA, 24 bp, Glycine max
ttcaaatgaaagaaataaacaact

SEQ ID NO: 2017 - DNA, 22 bp, Glycine max
ttgaatctctaacatccagttt

SEQ ID NO: 2018 - DNA, 22 bp, Glycine max
gcaggtatttgtcaacagtaag

SEQ ID NO: 2019 - DNA, 18 bp, Glycine max
aaataccatttgcccaca

SEQ ID NO: 2020 - DNA, 18 bp, Glycine max
aatttggcatgtgaaacc

SEQ ID NO: 2021 - DNA, 19 bp, Glycine max
ggtatgcctgggaagataa

SEQ ID NO: 2022 - DNA, 18 bp, Glycine max
aaattgaagcaccacatc

SEQ ID NO: 2023 - DNA, 22 bp, Glycine max
aaattctcgcttatagagatgc

SEQ ID NO: 2024 - DNA, 22 bp, Glycine max
acatgtttggtttgtacaattt

SEQ ID NO: 2025 - DNA, 25 bp, Glycine max
tgttatctaacacactttaaggaaa

SEQ ID NO: 2026 - DNA, 21 bp, Glycine max
aaattcattcaaacacatgct

SEQ ID NO: 2027 - DNA, 20 bp, Glycine max
cattctgcgtgtttagatca

SEQ ID NO: 2028 - DNA, 21 bp, Glycine max
aaattcattcaaacacatgct

SEQ ID NO: 2029 - DNA, 20 bp, Glycine max
cattctgcgtgtttagatca

SEQ ID NO: 2030 - DNA, 21 bp, Glycine max
aaattcattcaaacacatgct

SEQ ID NO: 2031 - DNA, 20 bp, Glycine max
cattctgcgtgtttagatca

SEQ ID NO: 2032 - DNA, 18 bp, Glycine max
ttggctcttcagcacatt

SEQ ID NO: 2033 - DNA, 20 bp, Glycine max
caatctcattagcagacacg

SEQ ID NO: 2034 - DNA, 18 bp, Glycine max
aagcatctcccaccaaat

SEQ ID NO: 2035 - DNA, 20 bp, Glycine max
aaacgtcatatgtggtcatt

SEQ ID NO: 2036 - DNA, 19 bp, Glycine max
cgacgcaataatcaagaaa

SEQ ID NO: 2037 - DNA, 18 bp, Glycine max
gatgaggtgttgccattt

SEQ ID NO: 2038 - DNA, 21 bp, Glycine max
tcaatgataaagtcctttgga

SEQ ID NO: 2039 - DNA, 21 bp, Glycine max
ggtttgcttaggtagaacaag

SEQ ID NO: 2040 - DNA, 23 bp, Glycine max
tttcattactttgtctcttcctc

SEQ ID NO: 2041 - DNA, 18 bp, Glycine max
agcgggacaaggagatag

SEQ ID NO: 2042 - DNA, 22 bp, Glycine max
tccatagatatgaaatttgctg

SEQ ID NO: 2043 - DNA, 22 bp, Glycine max
acactcacttatttgctcagaa

SEQ ID NO: 2044 - DNA, 19 bp, Glycine max
tttaacggcaagaatcaaa

SEQ ID NO: 2045 - DNA, 18 bp, Glycine max
gatgaaccaatccgatga

SEQ ID NO: 2046 - DNA, 18 bp, Glycine max
tcacccaacatccaaact

SEQ ID NO: 2047 - DNA, 18 bp, Glycine max
ggagtgcgggaaataaat

SEQ ID NO: 2048 - DNA, 18 bp, Glycine max
gcaaaggtgggtttgtaa

SEQ ID NO: 2049 - DNA, 18 bp, Glycine max
acatggcgtgattgttct

SEQ ID NO: 2050 - DNA, 18 bp, Glycine max
cctaccagtatcgggtca

SEQ ID NO: 2051 - DNA, 18 bp, Glycine max
aaagccctcggtatcatt

SEQ ID NO: 2052 - DNA, 19 bp, Glycine max
caacagtcagtacccaagg

SEQ ID NO: 2053 - DNA, 21 bp, Glycine max
aaagttaaggatgaaatttgt

SEQ ID NO: 2054 - DNA, 18 bp, Glycine max
aagcttcatggccaagtc

SEQ ID NO: 2055 - DNA, 19 bp, Glycine max
agtgcatgatgtgaggcta

SEQ ID NO: 2056 - DNA, 18 bp, Glycine max
aaggtcaagagggtttgg

SEQ ID NO: 2057 - DNA, 18 bp, Glycine max
attccatggtccctcact

SEQ ID NO: 2058 - DNA, 19 bp, Glycine max
gggtcgtaccaaataaacg

SEQ ID NO: 2059 - DNA, 23 bp, Glycine max
aattaattaaagtgtggagagag

SEQ ID NO: 2060 - DNA, 18 bp, Glycine max
gcctcatttctcattgga

SEQ ID NO: 2061 - DNA, 18 bp, Glycine max
gctatgcaagctggtgat

SEQ ID NO: 2062 - DNA, 18 bp, Glycine max
ttggagcatccaacattt

SEQ ID NO: 2063 - DNA, 19 bp, Glycine max
cggatcatcagttcgtatg

SEQ ID NO: 2064 - DNA, 18 bp, Glycine max
cgcagggttagatacgtg

SEQ ID NO: 2065 - DNA, 18 bp, Glycine max
ctgcaacgtgtagccaat

SEQ ID NO: 2066 - DNA, 17 bp, Glycine max
tggccctgatggtactc

SEQ ID NO: 2067 - DNA, 19 bp, Glycine max
tcattgaacatgcacaaca

SEQ ID NO: 2068 - DNA, 18 bp, Glycine max
cctgatggtactcgcttc

SEQ ID NO: 2069 - DNA, 19 bp, Glycine max
tcattgaacatgcacaaca

SEQ ID NO: 2070 - DNA, 18 bp, Glycine max
cttaatggccaattgctg

SEQ ID NO: 2071 - DNA, 21 bp, Glycine max
accttagaattcagaatgcac

SEQ ID NO: 2072 - DNA, 18 bp, Glycine max
ggaccgaaccatgttctt

SEQ ID NO: 2073 - DNA, 19 bp, Glycine max
ggcttatggccaaatttat

SEQ ID NO: 2074 - DNA, 19 bp, Glycine max
caggatcacgaatgaaaca

SEQ ID NO: 2075 - DNA, 18 bp, Glycine max
gggactttctcccaacat

SEQ ID NO: 2076 - DNA, 21 bp, Glycine max
tcactttgtagcaagaccttt

SEQ ID NO: 2077 - DNA, 18 bp, Glycine max
tgggtgcaaataagttgg

SEQ ID NO: 2078 - DNA, 18 bp, Glycine max
ccgctacaaagtgaccat

SEQ ID NO: 2079 - DNA, 23 bp, Glycine max
tgagattgttgttctctctttct

SEQ ID NO: 2080 - DNA, 18 bp, Glycine max
ccgctacaaagtgaccat

SEQ ID NO: 2081 - DNA, 18 bp, Glycine max
taacggctcttgctttgt

SEQ ID NO: 2082 - DNA, 18 bp, Glycine max
acaaagcaagagccgtta

SEQ ID NO: 2083 - DNA, 18 bp, Glycine max
aagcacagaaacgcaaac

SEQ ID NO: 2084 - DNA, 18 bp, Glycine max
tgtgcttgtgtgttgtcc

SEQ ID NO: 2085 - DNA, 18 bp, Glycine max
gtaacttccgaacgcaaa

SEQ ID NO: 2086 - DNA, 20 bp, Glycine max
tttcatgggaaagataaaca

SEQ ID NO: 2087 - DNA, 22 bp, Glycine max
actcacttgagagttagggatt

SEQ ID NO: 2088 - DNA, 18 bp, Glycine max
gccttgatttgaaccaca

SEQ ID NO: 2089 - DNA, 19 bp, Glycine max
tttgtcaaatccgactcaa

SEQ ID NO: 2090 - DNA, 19 bp, Glycine max
aagaaccatgtgaggaagg

SEQ ID NO: 2091 - DNA, 20 bp, Glycine max
ttgatagccttgttgaatcc

SEQ ID NO: 2092 - DNA, 18 bp, Glycine max
cagccaattcgttagagg

SEQ ID NO: 2093 - DNA, 18 bp, Glycine max
atggatgttgcaaagtgg

SEQ ID NO: 2094 - DNA, 18 bp, Glycine max
atggatgttgcaaagtgg

SEQ ID NO: 2095 - DNA, 18 bp, Glycine max
cgcagtcagagaaaggaa

SEQ ID NO: 2096 - DNA, 21 bp, Glycine max
tgtcacgaggaaattatttgt

SEQ ID NO: 2097 - DNA, 20 bp, Glycine max
ggacaggatatctgaattgc

SEQ ID NO: 2098 - DNA, 18 bp, Glycine max
cgcacacatttgaaggta

SEQ ID NO: 2099 - DNA, 18 bp, Glycine max
gagtatgggcacaccatt

SEQ ID NO: 2100 - DNA, 20 bp, Glycine max
ggacaggatatctgaattgc

SEQ ID NO: 2101 - DNA, 21 bp, Glycine max
tgtcacgaggaaattatttgt

SEQ ID NO: 2102 - DNA, 18 bp, Glycine max
cgcagtcagagaaaggaa

SEQ ID NO: 2103 - DNA, 18 bp, Glycine max
atggatgttgcaaagtgg

SEQ ID NO: 2104 - DNA, 18 bp, Glycine max
tgtgtgtgttccacatgc

SEQ ID NO: 2105 - DNA, 18 bp, Glycine max
tcagcaacaccttggaat

SEQ ID NO: 2106 - DNA, 18 bp, Glycine max
ggcgaggattgaagaaat

SEQ ID NO: 2107 - DNA, 25 bp, Glycine max
aagggttgatttaataatttacaga

SEQ ID NO: 2108 - DNA, 18 bp, Glycine max
ggcgaggattgaagaaat

SEQ ID NO: 2109 - DNA, 24 bp, Glycine max
aagggttgatttaataatttacag

SEQ ID NO: 2110 - DNA, 18 bp, Glycine max
ggccactacttggatgaa

SEQ ID NO: 2111 - DNA, 19 bp, Glycine max
ttcagaaggcagaatcaaa

SEQ ID NO: 2112 - DNA, 18 bp, Glycine max
aatagcgtgattggaacc

SEQ ID NO: 2113 - DNA, 25 bp, Glycine max
ttggatgtaacaacttatttgtatt

SEQ ID NO: 2114 - DNA, 19 bp, Glycine max
tgtgtggaatgcacattta

SEQ ID NO: 2115 - DNA, 19 bp, Glycine max
cgcaagatgatgttgattg

SEQ ID NO: 2116 - DNA, 20 bp, Glycine max
gtcgtgtttaagcatttgaa

SEQ ID NO: 2117 - DNA, 18 bp, Glycine max
gaaagccgaaggacatct

SEQ ID NO: 2118 - DNA, 18 bp, Glycine max
ggctttccggataagaga

SEQ ID NO: 2119 - DNA, 19 bp, Glycine max
gcgacagaaatcatgacag

SEQ ID NO: 2120 - DNA, 24 bp, Glycine max
tgttagtctgttacacaaatatcg

SEQ ID NO: 2121 - DNA, 19 bp, Glycine max
gcgacagaaatcatgacag

SEQ ID NO: 2122 - DNA, 17 bp, Glycine max
tagaggaggcggagaca

SEQ ID NO: 2123 - DNA, 19 bp, Glycine max
tctcctctgtcgaatgtca

SEQ ID NO: 2124 - DNA, 20 bp, Glycine max
gttaagttaattggccatgc

SEQ ID NO: 2125 - DNA, 18 bp, Glycine max
ttggttggactttggaga

SEQ ID NO: 2126 - DNA, 19 bp, Glycine max
agctgatgcgttacaacag

SEQ ID NO: 2127 - DNA, 17 bp, Glycine max
tgggtggagagggtgta

SEQ ID NO: 2128 - DNA, 18 bp, Glycine max
gcgtagtcagaggaagca

SEQ ID NO: 2129 - DNA, 18 bp, Glycine max
atgagggtgggaatgaat

SEQ ID NO: 2130 - DNA, 18 bp, Glycine max
atggatgttgcaaagtgg

SEQ ID NO: 2131 - DNA, 18 bp, Glycine max
cagccaattcgttagagg

SEQ ID NO: 2132 - DNA, 18 bp, Glycine max
ggaatggtagtggcagtg

SEQ ID NO: 2133 - DNA, 18 bp, Glycine max
cgttgaacggtttgaaat

SEQ ID NO: 2134 - DNA, 17 bp, Glycine max
ccggaatccactatcca

SEQ ID NO: 2135 - DNA, 20 bp, Glycine max
ttgtggttgcatgttagtgt

SEQ ID NO: 2136 - DNA, 18 bp, Glycine max
tggtggttgagaaggaga

SEQ ID NO: 2137 - DNA, 19 bp, Glycine max
gaggatttaaacccacgac

SEQ ID NO: 2138 - DNA, 18 bp, Glycine max
ccagttgcattctcttcg

SEQ ID NO: 2139 - DNA, 20 bp, Glycine max
gtgttctttgttgcttaccc

SEQ ID NO: 2140 - DNA, 19 bp, Glycine max
tccatgcattaaagcaaac

SEQ ID NO: 2141 - DNA, 19 bp, Glycine max
tggaatacttgtccctgaa

SEQ ID NO: 2142 - DNA, 17 bp, Glycine max
tgatgcacatcgcaatc

SEQ ID NO: 2143 - DNA, 18 bp, Glycine max
gggataccgggttgttac

SEQ ID NO: 2144 - DNA, 18 bp, Glycine max
agcaccctgtctaagtgc

SEQ ID NO: 2145 - DNA, 19 bp, Glycine max
ccaccatgaataatgacca

SEQ ID NO: 2146 - DNA, 18 bp, Glycine max
ccaaggtaaggcacacaa

SEQ ID NO: 2147 - DNA, 18 bp, Glycine max
catccaatccggtgataa

SEQ ID NO: 2148 - DNA, 18 bp, Glycine max
gcatctgtcacgaacgac

SEQ ID NO: 2149 - DNA, 18 bp, Glycine max
cctacgccttcttcttcc

SEQ ID NO: 2150 - DNA, 17 bp, Glycine max
aaaggtgggtgtgcttc

SEQ ID NO: 2151 - DNA, 18 bp, Glycine max
tctttcctctggaaacca

SEQ ID NO: 2152 - DNA, 18 bp, Glycine max
ggtgtgcttcccatttat

SEQ ID NO: 2153 - DNA, 18 bp, Glycine max
tctttcctctggaaacca

SEQ ID NO: 2154 - DNA, 22 bp, Glycine max
tgattcaatggtttgatatgtt

SEQ ID NO: 2155 - DNA, 17 bp, Glycine max
tttgcaggctgacaatg

SEQ ID NO: 2156 - DNA, 21 bp, Glycine max
ccctctatcaagtgtatcagc

SEQ ID NO: 2157 - DNA, 22 bp, Glycine max
gctactgatagggtgaacttct

SEQ ID NO: 2158 - DNA, 18 bp, Glycine max
gtgtcgaatggcatcaag

SEQ ID NO: 2159 - DNA, 20 bp, Glycine max
ctgtgcacaatttgattctc

SEQ ID NO: 2160 - DNA, 19 bp, Glycine max
ttgttgttagggtttgcag

SEQ ID NO: 2161 - DNA, 18 bp, Glycine max
cgccttcgcttcttattt

SEQ ID NO: 2162 - DNA, 19 bp, Glycine max
aacatcagcatcattacgg

SEQ ID NO: 2163 - DNA, 17 bp, Glycine max
ggtgggtgcatgaagaa

SEQ ID NO: 2164 - DNA, 22 bp, Glycine max
tcaaaccaaattaatgtttcat

SEQ ID NO: 2165 - DNA, 22 bp, Glycine max
tttgagtttcacagtaattcgt

SEQ ID NO: 2166 - DNA, 20 bp, Glycine max
aaagaatcgatttggattga

SEQ ID NO: 2167 - DNA, 20 bp, Glycine max
actccacctggatgagtaaa

SEQ ID NO: 2168 - DNA, 18 bp, Glycine max
tcctcagccttagtttgc

SEQ ID NO: 2169 - DNA, 18 bp, Glycine max
aggctgtagccttcatca

SEQ ID NO: 2170 - DNA, 18 bp, Glycine max
tgcatccggtcattctaa

SEQ ID NO: 2171 - DNA, 18 bp, Glycine max
cacactcaagaggccaga

SEQ ID NO: 2172 - DNA, 18 bp, Glycine max
agcgtagcgtaccatgag

SEQ ID NO: 2173 - DNA, 21 bp, Glycine max
ccattctatcgtcactcattc

SEQ ID NO: 2174 - DNA, 18 bp, Glycine max
catgtttcactcgcaatg

SEQ ID NO: 2175 - DNA, 19 bp, Glycine max
gcatactaagggcgtatcc

SEQ ID NO: 2176 - DNA, 20 bp, Glycine max
aaagcgttctcaatttcttt

SEQ ID NO: 2177 - DNA, 21 bp, Glycine max
aactccctaaatcaatcccta

SEQ ID NO: 2178 - DNA, 20 bp, Glycine max
aaagcgttctcaatttcttt

SEQ ID NO: 2179 - DNA, 22 bp, Glycine max
tctaaactccctaaatcaatcc

SEQ ID NO: 2180 - DNA, 18 bp, Glycine max
cccttcccttgcactaat

SEQ ID NO: 2181 - DNA, 21 bp, Glycine max
gaaatgctatgcactttctct

SEQ ID NO: 2182 - DNA, 25 bp, Glycine max
gaatgatgtagcaaataatttatga

SEQ ID NO: 2183 - DNA, 18 bp, Glycine max
tcactatcccgaatttgc

SEQ ID NO: 2184 - DNA, 21 bp, Glycine max
aattcatcgcaatacttcaaa

SEQ ID NO: 2185 - DNA, 23 bp, Glycine max
tttaatttgatttcaaaggtatg

SEQ ID NO: 2186 - DNA, 18 bp, Glycine max
cgaacaggccacaagtaa

SEQ ID NO: 2187 - DNA, 18 bp, Glycine max
ggaaggaaatggaattgg

SEQ ID NO: 2188 - DNA, 19 bp, Glycine max
ggatcgaactcatcgtctt

SEQ ID NO: 2189 - DNA, 18 bp, Glycine max
ccttctctcccgtcattt

SEQ ID NO: 2190 - DNA, 20 bp, Glycine max
aaacaatttacatggtgaca

SEQ ID NO: 2191 - DNA, 22 bp, Glycine max
cgtttctaacaacatttgagat

SEQ ID NO: 2192 - DNA, 21 bp, Glycine max
tctcaaatgttgttagaaacg

SEQ ID NO: 2193 - DNA, 20 bp, Glycine max
cctgtgaaatgcataaacaa

SEQ ID NO: 2194 - DNA, 22 bp, Glycine max
gcatttatcattgaattagagg

SEQ ID NO: 2195 - DNA, 18 bp, Glycine max
tttgctttctcgggtaga

SEQ ID NO: 2196 - DNA, 22 bp, Glycine max
ttcttgaattgaagtttacgtt

SEQ ID NO: 2197 - DNA, 18 bp, Glycine max
cctcaaaccaccttggat

SEQ ID NO: 2198 - DNA, 18 bp, Glycine max
gcaatcaacaatccgtgt

SEQ ID NO: 2199 - DNA, 19 bp, Glycine max
agcacttctagtcccgaaa

SEQ ID NO: 2200 - DNA, 18 bp, Glycine max
cccatggcttaacacaaa

SEQ ID NO: 2201 - DNA, 18 bp, Glycine max
tcgtgcaattgaagaaca

SEQ ID NO: 2202 - DNA, 22 bp, Glycine max
aaagagtcatgtcaaatccttc

SEQ ID NO: 2203 - DNA, 25 bp, Glycine max
tgtaaattaatctcaatcacgtaaa

SEQ ID NO: 2204 - DNA, 18 bp, Glycine max
gctttgcttggttggtaa

SEQ ID NO: 2205 - DNA, 18 bp, Glycine max
gaaagcggcttctattcc

SEQ ID NO: 2206 - DNA, 19 bp, Glycine max
cccactgtctctccttctc

SEQ ID NO: 2207 - DNA, 22 bp, Glycine max
ttatacctaaaccgatgttaaa

SEQ ID NO: 2208 - DNA, 19 bp, Glycine max
cagctacggtcaatctttg

SEQ ID NO: 2209 - DNA, 17 bp, Glycine max
tccgaggcgagtaggta

SEQ ID NO: 2210 - DNA, 18 bp, Glycine max
ttatcacgcaaccattca

SEQ ID NO: 2211 - DNA, 18 bp, Glycine max
ctgcccaagctaatctca

SEQ ID NO: 2212 - DNA, 17 bp, Glycine max
aaggccaaccctgactt

SEQ ID NO: 2213 - DNA, 16 bp, Glycine max
tgttgaagggcagcaa

SEQ ID NO: 2214 - DNA, 25 bp, Glycine max
ttgaatacggattataagctaattt

SEQ ID NO: 2215 - DNA, 21 bp, Glycine max
tttagactttcgagaatgaga

SEQ ID NO: 2216 - DNA, 25 bp, Glycine max
ttgaatacggattataagctaattt

SEQ ID NO: 2217 - DNA, 21 bp, Glycine max
tttagactttcgagaatgaga

SEQ ID NO: 2218 - DNA, 23 bp, Glycine max
aatctcattctcgaaagtctaaa

SEQ ID NO: 2219 - DNA, 19 bp, Glycine max
aagccaatgatgctaattt

SEQ ID NO: 2220 - DNA, 18 bp, Glycine max
acgaccgtgtctaaacga

SEQ ID NO: 2221 - DNA, 18 bp, Glycine max
ccatttggttgggtgtta

SEQ ID NO: 2222 - DNA, 19 bp, Glycine max
ttggtaggttcgatgttga

SEQ ID NO: 2223 - DNA, 20 bp, Glycine max
tcaatgccaaattaatctca

SEQ ID NO: 2224 - DNA, 18 bp, Glycine max
gcaactacctgcaacgag

SEQ ID NO: 2225 - DNA, 19 bp, Glycine max
aattacgcgagattctcct

SEQ ID NO: 2226 - DNA, 18 bp, Glycine max
taggagaatctcgcgtaa

SEQ ID NO: 2227 - DNA, 23 bp, Glycine max
aaatgtttatatatttgcagtca

SEQ ID NO: 2228 - DNA, 21 bp, Glycine max
tcatcgtgttctaggttagga

SEQ ID NO: 2229 - DNA, 22 bp, Glycine max
ttgattgacacatgtaattatg

SEQ ID NO: 2230 - DNA, 24 bp, Glycine max
acatatgttattcagcttagattt

SEQ ID NO: 2231 - DNA, 18 bp, Glycine max
accaactaccaaggtgct

SEQ ID NO: 2232 - DNA, 19 bp, Glycine max
acgcaaacaataagcattt

SEQ ID NO: 2233 - DNA, 22 bp, Glycine max
agattaaatcatgaacatccaa

SEQ ID NO: 2234 - DNA, 19 bp, Glycine max
acgcaaacaataagcattt

SEQ ID NO: 2235 - DNA, 22 bp, Glycine max
agattaaatcatgaacatccaa

SEQ ID NO: 2236 - DNA, 19 bp, Glycine max
ttcaagggaaggagaagaa

SEQ ID NO: 2237 - DNA, 22 bp, Glycine max
tcctttaatccatctcaatttc

SEQ ID NO: 2238 - DNA, 18 bp, Glycine max
ggctgcgtttatttctca

SEQ ID NO: 2239 - DNA, 18 bp, Glycine max
tcaaggattggatcagga

SEQ ID NO: 2240 - DNA, 19 bp, Glycine max
gcgtttgttacttcacacg

SEQ ID NO: 2241 - DNA, 18 bp, Glycine max
agcaagcatgtcttggaa

SEQ ID NO: 2242 - DNA, 17 bp, Glycine max
gagtcaacccacgcagt

SEQ ID NO: 2243 - DNA, 18 bp, Glycine max
gatggcctctcctacgtt

SEQ ID NO: 2244 - DNA, 19 bp, Glycine max
caggaacaaagaagccatt

SEQ ID NO: 2245 - DNA, 18 bp, Glycine max
ctgccactgaagtgcttt

SEQ ID NO: 2246 - DNA, 18 bp, Glycine max
ggtgaggagtatggacga

SEQ ID NO: 2247 - DNA, 18 bp, Glycine max
ctcttgctgcctcaacat

SEQ ID NO: 2248 - DNA, 18 bp, Glycine max
agttggcaaatcgaacct

SEQ ID NO: 2249 - DNA, 18 bp, Glycine max
gctccactggtaagtcca

SEQ ID NO: 2250 - DNA, 18 bp, Glycine max
gttcatgggtcaaaccaa

SEQ ID NO: 2251 - DNA, 18 bp, Glycine max
cgatcaacaaatcggaaa

SEQ ID NO: 2252 - DNA, 18 bp, Glycine max
ccaggaccatgaccctat

SEQ ID NO: 2253 - DNA, 18 bp, Glycine max
ttgcggtcattctctgat

SEQ ID NO: 2254 - DNA, 18 bp, Glycine max
ttgcatctccctgcttta

SEQ ID NO: 2255 - DNA, 21 bp, Glycine max
gggatttgaatcagaagactc

SEQ ID NO: 2256 - DNA, 18 bp, Glycine max
gatcccatccaccacttt

SEQ ID NO: 2257 - DNA, 18 bp, Glycine max
tatgctgcacccagaaat

SEQ ID NO: 2258 - DNA, 19 bp, Glycine max
agcatcaatttgcattcag

SEQ ID NO: 2259 - DNA, 18 bp, Glycine max
gagcaacatcctttgcac

SEQ ID NO: 2260 - DNA, 19 bp, Glycine max
catagcgaagcctcctaaa

SEQ ID NO: 2261 - DNA, 19 bp, Glycine max
ttcggtttgtgtttgttgt

SEQ ID NO: 2262 - DNA, 18 bp, Glycine max
tttcttcaccaccaccac

SEQ ID NO: 2263 - DNA, 17 bp, Glycine max
tccgaatcgatggaaac

SEQ ID NO: 2264 - DNA, 18 bp, Glycine max
aaagtcgccaggtctgtt

SEQ ID NO: 2265 - DNA, 17 bp, Glycine max
atgcctccgattaccaa

SEQ ID NO: 2266 - DNA, 18 bp, Glycine max
tggaacaacctcttcacc

SEQ ID NO: 2267 - DNA, 18 bp, Glycine max
gctgttccaagctttcat

SEQ ID NO: 2268 - DNA, 18 bp, Glycine max
tagcagatcaggcaggag

SEQ ID NO: 2269 - DNA, 18 bp, Glycine max
ccctcacttggtgaatga

SEQ ID NO: 2270 - DNA, 18 bp, Glycine max
gcggtaaggagtgattga

SEQ ID NO: 2271 - DNA, 18 bp, Glycine max
accaagattcaacccaaa

SEQ ID NO: 2272 - DNA, 18 bp, Glycine max
ggtagtttccatgctcca

SEQ ID NO: 2273 - DNA, 20 bp, Glycine max
ctgagtgctactgcttacca

SEQ ID NO: 2274 - DNA, 18 bp, Glycine max
aagaactgaggcggctat

SEQ ID NO: 2275 - DNA, 19 bp, Glycine max
catcgttctaagaccatgc

SEQ ID NO: 2276 - DNA, 18 bp, Glycine max
agggagaaaccattcgat

SEQ ID NO: 2277 - DNA, 19 bp, Glycine max
cactcatttggtgtgttca

SEQ ID NO: 2278 - DNA, 19 bp, Glycine max
tttgagctatgatggcttg

SEQ ID NO: 2279 - DNA, 20 bp, Glycine max
tcttggtgtaacgaagaact

SEQ ID NO: 2280 - DNA, 18 bp, Glycine max
ggttgaggttctgcaaca

SEQ ID NO: 2281 - DNA, 19 bp, Glycine max
gggagcatatcgaacctaa

SEQ ID NO: 2282 - DNA, 18 bp, Glycine max
ggcgccttaacattacaa

SEQ ID NO: 2283 - DNA, 18 bp, Glycine max
ccagccaaagattcaaga

SEQ ID NO: 2284 - DNA, 18 bp, Glycine max
gtgcaggccagtctctta

SEQ ID NO: 2285 - DNA, 18 bp, Glycine max
ttcctgcacaaactcagg

SEQ ID NO: 2286 - DNA, 18 bp, Glycine max
tttctcattcagccgtgt

SEQ ID NO: 2287 - DNA, 19 bp, Glycine max
tgtgcatggcatattcttt

SEQ ID NO: 2288 - DNA, 18 bp, Glycine max
agtcgctcctctgtcctt

SEQ ID NO: 2289 - DNA, 20 bp, Glycine max
ccgaggaatacacatcattt

SEQ ID NO: 2290 - DNA, 18 bp, Glycine max
ggtcctgccggataaata

SEQ ID NO: 2291 - DNA, 18 bp, Glycine max
cgtttccgatccgtttat

SEQ ID NO: 2292 - DNA, 21 bp, Glycine max
gcactaattagcgtgagttgt

SEQ ID NO: 2293 - DNA, 20 bp, Glycine max
tgtgtgttcaaccgatactt

SEQ ID NO: 2294 - DNA, 21 bp, Glycine max
agctctggtaggttaggtttc

SEQ ID NO: 2295 - DNA, 23 bp, Glycine max
caacatgagaaattaaacaagaa

SEQ ID NO: 2296 - DNA, 18 bp, Glycine max
cccatctcctgctaaggt

SEQ ID NO: 2297 - DNA, 21 bp, Glycine max
tgatccatattccataccaac

SEQ ID NO: 2298 - DNA, 18 bp, Glycine max
tgcatcactttggatgtg

SEQ ID NO: 2299 - DNA, 19 bp, Glycine max
aaatgtggtgtgtggattt

SEQ ID NO: 2300 - DNA, 18 bp, Glycine max
caaagggacccaaaggta

SEQ ID NO: 2301 - DNA, 19 bp, Glycine max
tcagcaatgcttcttgttt

SEQ ID NO: 2302 - DNA, 18 bp, Glycine max
gcgcctaatcagatggta

SEQ ID NO: 2303 - DNA, 23 bp, Glycine max
ccaataataataccatgacaatg

SEQ ID NO: 2304 - DNA, 20 bp, Glycine max
gagtcatgttgaagctgatg

SEQ ID NO: 2305 - DNA, 18 bp, Glycine max
atacgtaacctgccattt

SEQ ID NO: 2306 - DNA, 21 bp, Glycine max
ggaactgacaacattaaccag

SEQ ID NO: 2307 - DNA, 21 bp, Glycine max
aattcaatgacaaacataacc

SEQ ID NO: 2308 - DNA, 22 bp, Glycine max
tcagtgatggatagataacagg

SEQ ID NO: 2309 - DNA, 16 bp, Glycine max
aaaggcacggagtgtt

SEQ ID NO: 2310 - DNA, 17 bp, Glycine max
gaatgccggaattgtgt

SEQ ID NO: 2311 - DNA, 17 bp, Glycine max
agccattcaccatccat

SEQ ID NO: 2312 - DNA, 18 bp, Glycine max
atgccaagagcctaattt

SEQ ID NO: 2313 - DNA, 19 bp, Glycine max
ctctgtctcctacccatcc

SEQ ID NO: 2314 - DNA, 20 bp, Glycine max
tgattgtcatgtgacggata

SEQ ID NO: 2315 - DNA, 20 bp, Glycine max
acgaagaaatttccattgag

SEQ ID NO: 2316 - DNA, 22 bp, Glycine max
cggatgttaatttgttagaatg

SEQ ID NO: 2317 - DNA, 18 bp, Glycine max
tcccacgttgaattgtct

SEQ ID NO: 2318 - DNA, 18 bp, Glycine max
cctgggaaactcatttca

SEQ ID NO: 2319 - DNA, 18 bp, Glycine max
aatgagtgcgtgcgtagt

SEQ ID NO: 2320 - DNA, 18 bp, Glycine max
aaacttagccgcatttca

SEQ ID NO: 2321 - DNA, 18 bp, Glycine max
tgaccttgtggctgctat

SEQ ID NO: 2322 - DNA, 19 bp, Glycine max
gggcattatatcacgagtt

SEQ ID NO: 2323 - DNA, 18 bp, Glycine max
tgggccaatagatgattt

SEQ ID NO: 2324 - DNA, 19 bp, Glycine max
agggactgcataagcaact

SEQ ID NO: 2325 - DNA, 18 bp, Glycine max
ccacagccaccagattac

SEQ ID NO: 2326 - DNA, 18 bp, Glycine max
aattgaggagagggcaag

SEQ ID NO: 2327 - DNA, 18 bp, Glycine max
gacacgaacacgatggtt

SEQ ID NO: 2328 - DNA, 19 bp, Glycine max
accatgtttgctcagtttg

SEQ ID NO: 2329 - DNA, 19 bp, Glycine max
tgctatctttcaagcctca

SEQ ID NO: 2330 - DNA, 18 bp, Glycine max
tggctttgctttcacgta

SEQ ID NO: 2331 - DNA, 18 bp, Glycine max
aagcagcagaaagtacgc

SEQ ID NO: 2332 - DNA, 18 bp, Glycine max
aatgcatacaaggccaaa

SEQ ID NO: 2333 - DNA, 18 bp, Glycine max
ttgcatcttgcttcctct

SEQ ID NO: 2334 - DNA, 18 bp, Glycine max
attgccgaccctttctat

SEQ ID NO: 2335 - DNA, 20 bp, Glycine max
ccttgtcagatgaagtgtga

SEQ ID NO: 2336 - DNA, 18 bp, Glycine max
tcccttgtgggagaattt

SEQ ID NO: 2337 - DNA, 19 bp, Glycine max
gggaggagaatgtaaccaa

SEQ ID NO: 2338 - DNA, 18 bp, Glycine max
atatcgatcccactgcaa

SEQ ID NO: 2339 - DNA, 19 bp, Glycine max
aggctttgatcttgttgct

SEQ ID NO: 2340 - DNA, 18 bp, Glycine max
agccaattgcaacaacat

SEQ ID NO: 2341 - DNA, 18 bp, Glycine max
tcaacccaactccgatta

SEQ ID NO: 2342 - DNA, 23 bp, Glycine max
actgtagtgaaatgtgtgtttga

SEQ ID NO: 2343 - DNA, 19 bp, Glycine max
ttgagagctttccctcatt

SEQ ID NO: 2344 - DNA, 18 bp, Glycine max
ttcttcatcacccttgga

SEQ ID NO: 2345 - DNA, 19 bp, Glycine max
ctcactcttctttggcaca

SEQ ID NO: 2346 - DNA, 18 bp, Glycine max
ccaagttcagctgtttcc

SEQ ID NO: 2347 - DNA, 19 bp, Glycine max
tctgaccttgagctcttca

SEQ ID NO: 2348 - DNA, 18 bp, Glycine max
aatgttgctcgttgcttt

SEQ ID NO: 2349 - DNA, 18 bp, Glycine max
gtagctgcaggcagtgat

SEQ ID NO: 2350 - DNA, 20 bp, Glycine max
tttaatttgacaccaccaaa

SEQ ID NO: 2351 - DNA, 20 bp, Glycine max
tgtctatcttatgccaacga

SEQ ID NO: 2352 - DNA, 18 bp, Glycine max
gatcggttccctggtcta

SEQ ID NO: 2353 - DNA, 19 bp, Glycine max
agttcatcatgtcccttcc

SEQ ID NO: 2354 - DNA, 18 bp, Glycine max
ggctctcacttccttggt

SEQ ID NO: 2355 - DNA, 18 bp, Glycine max
ccactgcagctcatacaa

SEQ ID NO: 2356 - DNA, 19 bp, Glycine max
cgaccctggtaacaatctt

SEQ ID NO: 2357 - DNA, 20 bp, Glycine max
ttgtacaacacctgcacaat

SEQ ID NO: 2358 - DNA, 18 bp, Glycine max
cggtgaacgagaaagaga

SEQ ID NO: 2359 - DNA, 18 bp, Glycine max
gttcgttcatcccttcaa

SEQ ID NO: 2360 - DNA, 18 bp, Glycine max
ccagatgctcggacctat

SEQ ID NO: 2361 - DNA, 21 bp, Glycine max
aagggcacactttacatatca

SEQ ID NO: 2362 - DNA, 19 bp, Glycine max
aatactttgcgaaggaagc

SEQ ID NO: 2363 - DNA, 18 bp, Glycine max
atcccacctccttctctg

SEQ ID NO: 2364 - DNA, 19 bp, Glycine max
cgaccctggtaacaatctt

SEQ ID NO: 2365 - DNA, 20 bp, Glycine max
ttgtacaacacctgcacaat

SEQ ID NO: 2366 - DNA, 20 bp, Glycine max
aaatgtgataacgcaataaa

SEQ ID NO: 2367 - DNA, 18 bp, Glycine max
cagtaccacagcgcctat

SEQ ID NO: 2368 - DNA, 18 bp, Glycine max
cctcttcttggttggtga

SEQ ID NO: 2369 - DNA, 18 bp, Glycine max
tcacctgcatcattcaaa

SEQ ID NO: 2370 - DNA, 17 bp, Glycine max
gtaccttgaaggcatcc

SEQ ID NO: 2371 - DNA, 18 bp, Glycine max
aggcctcttacgctcatt

SEQ ID NO: 2372 - DNA, 18 bp, Glycine max
caaagaattcgccctctc

SEQ ID NO: 2373 - DNA, 18 bp, Glycine max
attggcacttcaaccaaa

SEQ ID NO: 2374 - DNA, 19 bp, Glycine max
tgtgtccaagagacaaaca

SEQ ID NO: 2375 - DNA, 20 bp, Glycine max
cagcagaaacattcttgtgt

SEQ ID NO: 2376 - DNA, 17 bp, Glycine max
atccatcaacgggtcag

SEQ ID NO: 2377 - DNA, 17 bp, Glycine max
gccacaaaggcactacc

SEQ ID NO: 2378 - DNA, 18 bp, Glycine max
aggagtttggaaggatcg

SEQ ID NO: 2379 - DNA, 18 bp, Glycine max
tagagcatttggcccttt

SEQ ID NO: 2380 - DNA, 18 bp, Glycine max
aatgcacaccacaacaca

SEQ ID NO: 2381 - DNA, 18 bp, Glycine max
cgtcttcgttcttcatcg

SEQ ID NO: 2382 - DNA, 24 bp, Glycine max
ttgataacaatattccaactaacc

SEQ ID NO: 2383 - DNA, 19 bp, Glycine max
ttatcaatagcaagccttt

SEQ ID NO: 2384 - DNA, 21 bp, Glycine max
aagttgaaagcaacaattaaa

SEQ ID NO: 2385 - DNA, 19 bp, Glycine max
ttatcaatagcaagccttt

SEQ ID NO: 2386 - DNA, 20 bp, Glycine max
aagcaggtaattccatttga

SEQ ID NO: 2387 - DNA, 19 bp, Glycine max
cgagtttgaaatggtgaaa

SEQ ID NO: 2388 - DNA, 21 bp, Glycine max
tttcatgatttggatttgttt

SEQ ID NO: 2389 - DNA, 18 bp, Glycine max
gccgatacggtaacatga

SEQ ID NO: 2390 - DNA, 21 bp, Glycine max
aaagtcattgtctcattcaca

SEQ ID NO: 2391 - DNA, 16 bp, Glycine max
gcttcccaacggattt

SEQ ID NO: 2392 - DNA, 20 bp, Glycine max
tctgcttctgtaaccaaatg

SEQ ID NO: 2393 - DNA, 18 bp, Glycine max
tattgtccgcaagttcgt

SEQ ID NO: 2394 - DNA, 20 bp, Glycine max
acattaagcaggaccgataa

SEQ ID NO: 2395 - DNA, 18 bp, Glycine max
atgttccttcaacccaaa

SEQ ID NO: 2396 - DNA, 18 bp, Glycine max
cttgatcctgaacccaaa

SEQ ID NO: 2397 - DNA, 21 bp, Glycine max
ttcacttggagtttagaaagc

SEQ ID NO: 2398 - DNA, 21 bp, Glycine max
gctttctaaactccaagtgaa

SEQ ID NO: 2399 - DNA, 18 bp, Glycine max
tttccttgcatcatgtgt

SEQ ID NO: 2400 - DNA, 21 bp, Glycine max
gctttctaaactccaagtgaa

SEQ ID NO: 2401 - DNA, 18 bp, Glycine max
tttccttgcatcatgtgt

SEQ ID NO: 2402 - DNA, 21 bp, Glycine max
gctttctaaactccaagtgaa

SEQ ID NO: 2403 - DNA, 18 bp, Glycine max
tttccttgcatcatgtgt

SEQ ID NO: 2404 - DNA, 20 bp, Glycine max
aatgaaggagagaatgtgct

SEQ ID NO: 2405 - DNA, 17 bp, Glycine max
acaactggctccaatgc

SEQ ID NO: 2406 - DNA, 18 bp, Glycine max
attgattcacagcgatgg

SEQ ID NO: 2407 - DNA, 18 bp, Glycine max
tgcacatacgagatgcaa

SEQ ID NO: 2408 - DNA, 18 bp, Glycine max
tcccacacttggtaatcg

SEQ ID NO: 2409 - DNA, 18 bp, Glycine max
gtcgcagatgccatagag

SEQ ID NO: 2410 - DNA, 23 bp, Glycine max
aagtgatgtatgactgaatgaaa

SEQ ID NO: 2411 - DNA, 20 bp, Glycine max
tgaacttgcaattgatttga

SEQ ID NO: 2412 - DNA, 19 bp, Glycine max
gaggtccaaggtgcatact

SEQ ID NO: 2413 - DNA, 18 bp, Glycine max
ttgcttcctggcatactc

SEQ ID NO: 2414 - DNA, 18 bp, Glycine max
atgcttgcagtggacaat

SEQ ID NO: 2415 - DNA, 18 bp, Glycine max
tgcaccttatttccttcc

SEQ ID NO: 2416 - DNA, 21 bp, Glycine max
tgcacataaataaccaagaca

SEQ ID NO: 2417 - DNA, 18 bp, Glycine max
agccaaatttgaaagcaa

SEQ ID NO: 2418 - DNA, 21 bp, Glycine max
caatctccctctctctctctc

SEQ ID NO: 2419 - DNA, 18 bp, Glycine max
agccaaatttgaaagcaa

SEQ ID NO: 2420 - DNA, 20 bp, Glycine max
tctgtgtgtttgtgtgtgtg

SEQ ID NO: 2421 - DNA, 18 bp, Glycine max
agccaaatttgaaagcaa

SEQ ID NO: 2422 - DNA, 20 bp, Glycine max
tctgtgtgtttgtgtgtgtg

SEQ ID NO: 2423 - DNA, 18 bp, Glycine max
agccaaatttgaaagcaa

SEQ ID NO: 2424 - DNA, 21 bp, Glycine max
tccatatgttcattcgaaact

SEQ ID NO: 2425 - DNA, 18 bp, Glycine max
gggtaaagctgcgtacaa

SEQ ID NO: 2426 - DNA, 18 bp, Glycine max
tacggcaacatttcaggt

SEQ ID NO: 2427 - DNA, 18 bp, Glycine max
aacaacaccagcagagga

SEQ ID NO: 2428 - DNA, 18 bp, Glycine max
taattcgtttgcctcgtt

SEQ ID NO: 2429 - DNA, 18 bp, Glycine max
aacgacgacgacaacagt

SEQ ID NO: 2430 - DNA, 18 bp, Glycine max
tcgaaggatgctctggta

SEQ ID NO: 2431 - DNA, 18 bp, Glycine max
tgctgcttgtttctcaca

SEQ ID NO: 2432 - DNA, 18 bp, Glycine max
tcgaaggatgctctggta

SEQ ID NO: 2433 - DNA, 18 bp, Glycine max
tgctgcttgtttctcaca

SEQ ID NO: 2434 - DNA, 18 bp, Glycine max
ggcagaggcaaattacaa

SEQ ID NO: 2435 - DNA, 19 bp, Glycine max
cttgctcctcgtattcctc

SEQ ID NO: 2436 - DNA, 17 bp, Glycine max
tctggttgctccagagg

SEQ ID NO: 2437 - DNA, 18 bp, Glycine max
tattatttccgcctgcac

SEQ ID NO: 2438 - DNA, 20 bp, Glycine max
tgaggaagaagaaagcaaga

SEQ ID NO: 2439 - DNA, 18 bp, Glycine max
catccaccacccttctct

SEQ ID NO: 2440 - DNA, 18 bp, Glycine max
catagccagtgcaagtcc

SEQ ID NO: 2441 - DNA, 18 bp, Glycine max
ttctcgaagggtcattcc

SEQ ID NO: 2442 - DNA, 18 bp, Glycine max
ggagaaggaggaggaaga

SEQ ID NO: 2443 - DNA, 18 bp, Glycine max
caccctttcctcttacgg

SEQ ID NO: 2444 - DNA, 18 bp, Glycine max
tcaattctgcacaacacg

SEQ ID NO: 2445 - DNA, 23 bp, Glycine max
tgagtgatacaatacaatggaaa

SEQ ID NO: 2446 - DNA, 18 bp, Glycine max
ggactcttcaggtgggta

SEQ ID NO: 2447 - DNA, 18 bp, Glycine max
ccaacaatagcagcatga

SEQ ID NO: 2448 - DNA, 18 bp, Glycine max
ttgtgggtcatgtccttt

SEQ ID NO: 2449 - DNA, 19 bp, Glycine max
gggtgttattggttccgta

SEQ ID NO: 2450 - DNA, 18 bp, Glycine max
ttgtgggtcatgtccttt

SEQ ID NO: 2451 - DNA, 19 bp, Glycine max
gggtgttattggttccgta

SEQ ID NO: 2452 - DNA, 18 bp, Glycine max
gcaaggtttgagaaagca

SEQ ID NO: 2453 - DNA, 19 bp, Glycine max
ttgcctcttgcgtattaaa

SEQ ID NO: 2454 - DNA, 18 bp, Glycine max
gcaaggtttgagaaagca

SEQ ID NO: 2455 - DNA, 19 bp, Glycine max
ttgcctcttgcgtattaaa

SEQ ID NO: 2456 - DNA, 19 bp, Glycine max
tggctaggcaagtactgaa

SEQ ID NO: 2457 - DNA, 18 bp, Glycine max
gcaattcctgaggtgtca

SEQ ID NO: 2458 - DNA, 17 bp, Glycine max
atttgccagcgatcaac

SEQ ID NO: 2459 - DNA, 18 bp, Glycine max
caacatggatatgccaca

SEQ ID NO: 2460 - DNA, 18 bp, Glycine max
tgtggcatatccatgttg

SEQ ID NO: 2461 - DNA, 18 bp, Glycine max
ggtgaccgaaagtgtgaa

SEQ ID NO: 2462 - DNA, 18 bp, Glycine max
ggttcatgcgaacatcat

SEQ ID NO: 2463 - DNA, 21 bp, Glycine max
tgataattcatgattgaagga

SEQ ID NO: 2464 - DNA, 18 bp, Glycine max
ccgaagcaagcatatcat

SEQ ID NO: 2465 - DNA, 18 bp, Glycine max
tagcaattcccaaaccaa

SEQ ID NO: 2466 - DNA, 24 bp, Glycine max
tttagttaattagagcgtcatgtt

SEQ ID NO: 2467 - DNA, 18 bp, Glycine max
cccataaggatcgcatag

SEQ ID NO: 2468 - DNA, 18 bp, Glycine max
gtgttctgcgaaggtgac

SEQ ID NO: 2469 - DNA, 18 bp, Glycine max
cgtttccagatccctctc

SEQ ID NO: 2470 - DNA, 18 bp, Glycine max
tgtgttcgccatattgaa

SEQ ID NO: 2471 - DNA, 19 bp, Glycine max
cctaccgctattcaacctc

SEQ ID NO: 2472 - DNA, 19 bp, Glycine max
ggaggttgaatagcggtag

SEQ ID NO: 2473 - DNA, 20 bp, Glycine max
tgaaatgaatgtgaaggtga

SEQ ID NO: 2474 - DNA, 21 bp, Glycine max
aatctcacctggttagtcaaa

SEQ ID NO: 2475 - DNA, 21 bp, Glycine max
tcaatatttggagttctgtcc

SEQ ID NO: 2476 - DNA, 18 bp, Glycine max
cactgtgccattatgcaa

SEQ ID NO: 2477 - DNA, 20 bp, Glycine max
ttgctagccctctatttctg

SEQ ID NO: 2478 - DNA, 20 bp, Glycine max
ggtgtttgaaggaaatttga

SEQ ID NO: 2479 - DNA, 20 bp, Glycine max
ttgctagccctctatttctg

SEQ ID NO: 2480 - DNA, 19 bp, Glycine max
tctcagtctcagacacacg

SEQ ID NO: 2481 - DNA, 18 bp, Glycine max
ttaacccaagctcaacca

SEQ ID NO: 2482 - DNA, 18 bp, Glycine max
cctttagctccacggttt

SEQ ID NO: 2483 - DNA, 18 bp, Glycine max
tcagaaatgggagttgga

SEQ ID NO: 2484 - DNA, 18 bp, Glycine max
cctttagctccacggttt

SEQ ID NO: 2485 - DNA, 18 bp, Glycine max
tcagaaatgggagttgga

SEQ ID NO: 2486 - DNA, 18 bp, Glycine max
tgaagcaagggagcatac

SEQ ID NO: 2487 - DNA, 19 bp, Glycine max
aaggtaaggaacgaatcca

SEQ ID NO: 2488 - DNA, 18 bp, Glycine max
gaagcaagggagcataca

SEQ ID NO: 2489 - DNA, 19 bp, Glycine max
aaggtaaggaacgaatcca

SEQ ID NO: 2490 - DNA, 19 bp, Glycine max
tggattcgttccttacctt

SEQ ID NO: 2491 - DNA, 18 bp, Glycine max
aggctgcatgtaggtctg

SEQ ID NO: 2492 - DNA, 22 bp, Glycine max
tcagtttgtttgcacttaattt

SEQ ID NO: 2493 - DNA, 18 bp, Glycine max
gagtccagcgacatgaat

SEQ ID NO: 2494 - DNA, 19 bp, Glycine max
tttggctttcctgttacct

SEQ ID NO: 2495 - DNA, 18 bp, Glycine max
gctatgagtccagcgaca

SEQ ID NO: 2496 - DNA, 19 bp, Glycine max
tgggaggattaagacttgg

SEQ ID NO: 2497 - DNA, 23 bp, Glycine max
acaagttattcaactcaatgaaa

SEQ ID NO: 2498 - DNA, 24 bp, Glycine max
ttggtgctagataaataatctctg

SEQ ID NO: 2499 - DNA, 20 bp, Glycine max
tgctgttatgttagctttcg

SEQ ID NO: 2500 - DNA, 18 bp, Glycine max
tttaggtgggagcatgaa

SEQ ID NO: 2501 - DNA, 23 bp, Glycine max
ggttcttcttcttcacattatca

SEQ ID NO: 2502 - DNA, 18 bp, Glycine max
tttaggtgggagcatgaa

SEQ ID NO: 2503 - DNA, 21 bp, Glycine max
tcatcaatagagaacccgata

SEQ ID NO: 2504 - DNA, 19 bp, Glycine max
tggaagagacaaagcatca

SEQ ID NO: 2505 - DNA, 18 bp, Glycine max
cactcacaccattgctga

SEQ ID NO: 2506 - DNA, 18 bp, Glycine max
tcagcaatggtgtgagtg

SEQ ID NO: 2507 - DNA, 18 bp, Glycine max
cctcttccaattgtgtcg

SEQ ID NO: 2508 - DNA, 22 bp, Glycine max
caatccaattctcaacataaca

SEQ ID NO: 2509 - DNA, 20 bp, Glycine max
gatgttcaaaggagatccaa

SEQ ID NO: 2510 - DNA, 18 bp, Glycine max
cagattgacggattccag

SEQ ID NO: 2511 - DNA, 18 bp, Glycine max
ttgggttccaacaagatt

SEQ ID NO: 2512 - DNA, 18 bp, Glycine max
tggactctggacttggag

SEQ ID NO: 2513 - DNA, 18 bp, Glycine max
tgctgattgctttcttgg

SEQ ID NO: 2514 - DNA, 19 bp, Glycine max
tggtagttccaagatgtgc

SEQ ID NO: 2515 - DNA, 18 bp, Glycine max
atgctggtcgcatatgat

SEQ ID NO: 2516 - DNA, 23 bp, Glycine max
tgagactattgttgtaaatggag

SEQ ID NO: 2517 - DNA, 19 bp, Glycine max
cccacctttagacttaccc

SEQ ID NO: 2518 - DNA, 20 bp, Glycine max
aagcacggtctattcagaag

SEQ ID NO: 2519 - DNA, 18 bp, Glycine max
gcgaaatggtgctaatga

SEQ ID NO: 2520 - DNA, 20 bp, Glycine max
agcatttcatgtcattcctc

SEQ ID NO: 2521 - DNA, 18 bp, Glycine max
aaagccgtacctcgtaca

SEQ ID NO: 2522 - DNA, 18 bp, Glycine max
tccattgtcttcctcgtg

SEQ ID NO: 2523 - DNA, 17 bp, Glycine max
cactgcaggtcccaaat

SEQ ID NO: 2524 - DNA, 20 bp, Glycine max
aacttaatcgtccaaatcgt

SEQ ID NO: 2525 - DNA, 19 bp, Glycine max
tttcggttattgattgttt

SEQ ID NO: 2526 - DNA, 19 bp, Glycine max
aacctggaagttctttcct

SEQ ID NO: 2527 - DNA, 18 bp, Glycine max
acgggcgtagctacattt

SEQ ID NO: 2528 - DNA, 22 bp, Glycine max
tgaacaagtaagacactttgga

SEQ ID NO: 2529 - DNA, 21 bp, Glycine max
gcttacagtttgcagaagaaa

SEQ ID NO: 2530 - DNA, 19 bp, Glycine max
cctgtgtgcattcattgtt

SEQ ID NO: 2531 - DNA, 18 bp, Glycine max
gtcatggcttggcttcta

SEQ ID NO: 2532 - DNA, 19 bp, Glycine max
ttggtagagaagccaaggt

SEQ ID NO: 2533 - DNA, 21 bp, Glycine max
ggacaatattgctaatggaaa

SEQ ID NO: 2534 - DNA, 17 bp, Glycine max
cctggaccaccaacatt

SEQ ID NO: 2535 - DNA, 21 bp, Glycine max
tcaacatatttccctaacacg

SEQ ID NO: 2536 - DNA, 18 bp, Glycine max
aaagtgtccagccacaaa

SEQ ID NO: 2537 - DNA, 18 bp, Glycine max
gacagttcggtggtatgc

SEQ ID NO: 2538 - DNA, 18 bp, Glycine max
ccaccgaactgtcaattt

SEQ ID NO: 2539 - DNA, 19 bp, Glycine max
tttagtcggacgacaattt

SEQ ID NO: 2540 - DNA, 19 bp, Glycine max
tgtgaaacaaaggcatgtt

SEQ ID NO: 2541 - DNA, 18 bp, Glycine max
aggattcaaatccgcaat

SEQ ID NO: 2542 - DNA, 18 bp, Glycine max
aagggcaaatccaaagat

SEQ ID NO: 2543 - DNA, 24 bp, Glycine max
tgatattggttaaggttattatca

SEQ ID NO: 2544 - DNA, 19 bp, Glycine max
aaacaacacatcctgcaaa

SEQ ID NO: 2545 - DNA, 20 bp, Glycine max
cagttccattctaacgaacc

SEQ ID NO: 2546 - DNA, 18 bp, Glycine max
cgttgcaacaatgaatga

SEQ ID NO: 2547 - DNA, 18 bp, Glycine max
ctatggctgcttccaaca

SEQ ID NO: 2548 - DNA, 18 bp, Glycine max
tcaatagcagccggtaga

SEQ ID NO: 2549 - DNA, 18 bp, Glycine max
tgtctcaatttgggtgct

SEQ ID NO: 2550 - DNA, 23 bp, Glycine max
aactattgaaagcaaacagattt

SEQ ID NO: 2551 - DNA, 18 bp, Glycine max
gtttatgtagcgccctgt

SEQ ID NO: 2552 - DNA, 18 bp, Glycine max
aacacaagtgccttctcg

SEQ ID NO: 2553 - DNA, 18 bp, Glycine max
ttgggaaagaagatcagc

SEQ ID NO: 2554 - DNA, 18 bp, Glycine max
ttggagaagcagcaattt

SEQ ID NO: 2555 - DNA, 18 bp, Glycine max
tctcgctaattccacgtt

SEQ ID NO: 2556 - DNA, 18 bp, Glycine max
aacgtggaattagcgaga

SEQ ID NO: 2557 - DNA, 18 bp, Glycine max
tccaaaccttcagatcca

SEQ ID NO: 2558 - DNA, 23 bp, Glycine max
aaataaatctctcgcatcttaaa

SEQ ID NO: 2559 - DNA, 20 bp, Glycine max
tgccagtagtttcatgtgat

SEQ ID NO: 2560 - DNA, 18 bp, Glycine max
tggctttgctttcacgta

SEQ ID NO: 2561 - DNA, 18 bp, Glycine max
aagcagcagaaagtacgc

SEQ ID NO: 2562 - DNA, 20 bp, Glycine max
tctgcttctgtaaccaaatg

SEQ ID NO: 2563 - DNA, 18 bp, Glycine max
tattgtccgcaagttcgt

SEQ ID NO: 2564 - DNA, 20 bp, Glycine max
cagcagaaacattcttgtgt

SEQ ID NO: 2565 - DNA, 19 bp, Glycine max
tgtgtccaagagacaaaca

SEQ ID NO: 2566 - DNA, 18 bp, Glycine max
gaagggaccgttgtaagg

SEQ ID NO: 2567 - DNA, 18 bp, Glycine max
aggccactcaagagaacc

SEQ ID NO: 2568 - DNA, 18 bp, Glycine max
gcgaggattgtgagcata

SEQ ID NO: 2569 - DNA, 18 bp, Glycine max
attccctccctcaacaaa

SEQ ID NO: 2570 - DNA, 20 bp, Glycine max
tcctggaacatttcttcatc

SEQ ID NO: 2571 - DNA, 20 bp, Glycine max
cacacgtctgtgttcagaaa

SEQ ID NO: 2572 - DNA, 23 bp, Glycine max
actgtagtgaaatgtgtgtttga

SEQ ID NO: 2573 - DNA, 19 bp, Glycine max
ttgagagctttccctcatt

SEQ ID NO: 2574 - DNA, 20 bp, Glycine max
aatgaaggagagaatgtgct

SEQ ID NO: 2575 - DNA, 17 bp, Glycine max
acaactggctccaatgc

SEQ ID NO: 2576 - DNA, 21 bp, Glycine max
tccatatgttcattcgaaact

SEQ ID NO: 2577 - DNA, 18 bp, Glycine max
gggtaaagctgcgtacaa

SEQ ID NO: 2578 - DNA, 19 bp, Glycine max
ctcactcttctttggcaca

SEQ ID NO: 2579 - DNA, 18 bp, Glycine max
ttcttcatcacccttgga

SEQ ID NO: 2580 - DNA, 19 bp, Glycine max
tcgcaacttcataaggaaa

SEQ ID NO: 2581 - DNA, 19 bp, Glycine max
ccaatatttggtacccatc

SEQ ID NO: 2582 - DNA, 19 bp, Glycine max
cgagtttgaaatggtgaaa

SEQ ID NO: 2583 - DNA, 20 bp, Glycine max
aagcaggtaattccatttga

SEQ ID NO: 2584 - DNA, 20 bp, Glycine max
acgaagaaatttccattgag

SEQ ID NO: 2585 - DNA, 20 bp, Glycine max
tgattgtcatgtcacggata

SEQ ID NO: 2586 - DNA, 18 bp, Glycine max
aattcaaggtgggagagg

SEQ ID NO: 2587 - DNA, 19 bp, Glycine max
caacggttgaatcaataaa

SEQ ID NO: 2588 - DNA, 23 bp, Glycine max
ttccatttcaattaataatgctt

SEQ ID NO: 2589 - DNA, 18 bp, Glycine max
catgcatttcatgccata

SEQ ID NO: 2590 - DNA, 18 bp, Glycine max
tggatgcatttgttgtca

SEQ ID NO: 2591 - DNA, 21 bp, Glycine max
caaattagtacggaggctaga

SEQ ID NO: 2592 - DNA, 18 bp, Glycine max
gggagagggaaggaataa

SEQ ID NO: 2593 - DNA, 20 bp, Glycine max
tcaaacaaacaaccaacaaa

SEQ ID NO: 2594 - DNA, 20 bp, Glycine max
tgctgacataaaccacttca

SEQ ID NO: 2595 - DNA, 18 bp, Glycine max
tgaatttgatccctcgtg

SEQ ID NO: 2596 - DNA, 21 bp, Glycine max
caacggttggataaataatga

SEQ ID NO: 2597 - DNA, 19 bp, Glycine max
tcctgtcaacgtttcttgt

SEQ ID NO: 2598 - DNA, 19 bp, Glycine max
tttccatttctgttccaca

SEQ ID NO: 2599 - DNA, 18 bp, Glycine max
cacacgaaggaggagaga

SEQ ID NO: 2600 - DNA, 17 bp, Glycine max
tgcccacctcattatcc

SEQ ID NO: 2601 - DNA, 19 bp, Glycine max
catgctcaatctcaaatgg

SEQ ID NO: 2602 - DNA, 18 bp, Glycine max
cccggtcttagttccttc

SEQ ID NO: 2603 - DNA, 18 bp, Glycine max
ctttgacctcctgctcct

SEQ ID NO: 2604 - DNA, 18 bp, Glycine max
caggaattcactggcatc

SEQ ID NO: 2605 - DNA, 18 bp, Glycine max
ggaggtgtttgtgtttgc

SEQ ID NO: 2606 - DNA, 18 bp, Glycine max
tcctcctcctcctctttc

SEQ ID NO: 2607 - DNA, 18 bp, Glycine max
ggaggtgtttgtgtttgc

SEQ ID NO: 2608 - DNA, 18 bp, Glycine max
ctaccatccaatgggaaa

SEQ ID NO: 2609 - DNA, 19 bp, Glycine max
gttgctttaaaccgtgtga

SEQ ID NO: 2610 - DNA, 18 bp, Glycine max
tacgaaagaatcctggag

SEQ ID NO: 2611 - DNA, 18 bp, Glycine max
tgatgctgccattgtatg

SEQ ID NO: 2612 - DNA, 18 bp, Glycine max
gctacaggcatttgcatt

SEQ ID NO: 2613 - DNA, 18 bp, Glycine max
cgaaattgtagggcactg

SEQ ID NO: 2614 - DNA, 18 bp, Glycine max
gtcatgggttgcgtaaag

SEQ ID NO: 2615 - DNA, 23 bp, Glycine max
tttatatcaattaatccatgcac

SEQ ID NO: 2616 - DNA, 23 bp, Glycine max
cctcctatttagtacgagttcaa

SEQ ID NO: 2617 - DNA, 18 bp, Glycine max
ttcggagggaatagacct

SEQ ID NO: 2618 - DNA, 23 bp, Glycine max
cctcctatttagtacgagttcaa

SEQ ID NO: 2619 - DNA, 18 bp, Glycine max
ttcggagggaatagacct

SEQ ID NO: 2620 - DNA, 18 bp, Glycine max
ctgtcccggttgatgata

SEQ ID NO: 2621 - DNA, 19 bp, Glycine max
gcctcttggtccgtatagt

SEQ ID NO: 2622 - DNA, 18 bp, Glycine max
aatgcattgtgcatgttt

SEQ ID NO: 2623 - DNA, 19 bp, Glycine max
ttgtgcgtttaatgtatgc

SEQ ID NO: 2624 - DNA, 19 bp, Glycine max
ccagctatcaatgttggag

SEQ ID NO: 2625 - DNA, 22 bp, Glycine max
tttaactaagagtcgttctcaa

SEQ ID NO: 2626 - DNA, 18 bp, Glycine max
ttgctcgtgacctcatct

SEQ ID NO: 2627 - DNA, 21 bp, Glycine max
aaccaagagttcagaaatcaa

SEQ ID NO: 2628 - DNA, 21 bp, Glycine max
tcaaccatctcaaactattgc

SEQ ID NO: 2629 - DNA, 24 bp, Glycine max
cctaatcattgatacattattctt

SEQ ID NO: 2630 - DNA, 18 bp, Glycine max
ggcagtacccaacactga

SEQ ID NO: 2631 - DNA, 18 bp, Glycine max
gggtacagccaaattgaa

SEQ ID NO: 2632 - DNA, 18 bp, Glycine max
ttggctgtacccaacact

SEQ ID NO: 2633 - DNA, 18 bp, Glycine max
attgcagcatggacattt

SEQ ID NO: 2634 - DNA, 17 bp, Glycine max
gcagctgccatgtgtaa

SEQ ID NO: 2635 - DNA, 18 bp, Glycine max
cgctgattgaagttgagc

SEQ ID NO: 2636 - DNA, 17 bp, Glycine max
aggcagcgatgagtgaa

SEQ ID NO: 2637 - DNA, 18 bp, Glycine max
agcttgttcaaggaagca

SEQ ID NO: 2638 - DNA, 18 bp, Glycine max
cttgccatgatggtcatt

SEQ ID NO: 2639 - DNA, 18 bp, Glycine max
ttggctatcgatgctgtt

SEQ ID NO: 2640 - DNA, 24 bp, Glycine max
tgtaaagtcaacaaactaatcaaa

SEQ ID NO: 2641 - DNA, 24 bp, Glycine max
tcccattattattaagaaactcaa

SEQ ID NO: 2642 - DNA, 19 bp, Glycine max
aggatcctggaaatcactt

SEQ ID NO: 2643 - DNA, 18 bp, Glycine max
tttggacatggacgattt

SEQ ID NO: 2644 - DNA, 18 bp, Glycine max
aagcaagcctctctcgta

SEQ ID NO: 2645 - DNA, 19 bp, Glycine max
tgggaatgatccattaaga

SEQ ID NO: 2646 - DNA, 18 bp, Glycine max
tatttgctttgggagcag

SEQ ID NO: 2647 - DNA, 18 bp, Glycine max
gcaactcgatcgaatcat

SEQ ID NO: 2648 - DNA, 23 bp, Glycine max
aacataaatagctttccttcaaa

SEQ ID NO: 2649 - DNA, 18 bp, Glycine max
aagttggcaatgaatgga

SEQ ID NO: 2650 - DNA, 20 bp, Glycine max
tttctttggataattggttt

SEQ ID NO: 2651 - DNA, 18 bp, Glycine max
tccttcaaccaatgagga

SEQ ID NO: 2652 - DNA, 18 bp, Glycine max
tcctcattggttgaagga

SEQ ID NO: 2653 - DNA, 21 bp, Glycine max
tgcagaaagtttacctaccaa

SEQ ID NO: 2654 - DNA, 18 bp, Glycine max
agccaacacacacacaca

SEQ ID NO: 2655 - DNA, 21 bp, Glycine max
tgcagaaagtttacctaccaa

SEQ ID NO: 2656 - DNA, 18 bp, Glycine max
gaaggagcgagtttcaca

SEQ ID NO: 2657 - DNA, 19 bp, Glycine max
tgagtgaatgagtgggaga

SEQ ID NO: 2658 - DNA, 18 bp, Glycine max
ggaacaccaagggaagac

SEQ ID NO: 2659 - DNA, 18 bp, Glycine max
tctgacaacatgcgagaa

SEQ ID NO: 2660 - DNA, 18 bp, Glycine max
gcttcgatgtcgataagg

SEQ ID NO: 2661 - DNA, 18 bp, Glycine max
gagggtgacgtaggcttt

SEQ ID NO: 2662 - DNA, 19 bp, Glycine max
gaagggtttctttcactgg

SEQ ID NO: 2663 - DNA, 18 bp, Glycine max
gtcctgctcaaacacagc

SEQ ID NO: 2664 - DNA, 23 bp, Glycine max
ggtcctaatacctaggacaactg

SEQ ID NO: 2665 - DNA, 19 bp, Glycine max
tgccaataattgtttgtcc

SEQ ID NO: 2666 - DNA, 21 bp, Glycine max
gagactttccatattgtttgc

SEQ ID NO: 2667 - DNA, 18 bp, Glycine max
acaactttaccgctgcac

SEQ ID NO: 2668 - DNA, 18 bp, Glycine max
tttctgcaaccaaaccac

SEQ ID NO: 2669 - DNA, 18 bp, Glycine max
gctgttcagatcccgtaa

SEQ ID NO: 2670 - DNA, 19 bp, Glycine max
agattccgattcggttaaa

SEQ ID NO: 2671 - DNA, 18 bp, Glycine max
aagcctcattctcgctct

SEQ ID NO: 2672 - DNA, 18 bp, Glycine max
tcacgggtttcgtaactg

SEQ ID NO: 2673 - DNA, 25 bp, Glycine max
ccgtataaatgtaagtagagtgtca

SEQ ID NO: 2674 - DNA, 17 bp, Glycine max
cgtgccatgtttcaaga

SEQ ID NO: 2675 - DNA, 18 bp, Glycine max
acgcataagcaagcaaac

SEQ ID NO: 2676 - DNA, 18 bp, Glycine max
cagttgttcaaggcttcg

SEQ ID NO: 2677 - DNA, 18 bp, Glycine max
acggaatccctgtttctc

SEQ ID NO: 2678 - DNA, 21 bp, Glycine max
ctttggaatttcgttatcttt

SEQ ID NO: 2679 - DNA, 24 bp, Glycine max
aaattagacccaattaaactcatt

SEQ ID NO: 2680 - DNA, 18 bp, Glycine max
tgaagggtgttgtgaagg

SEQ ID NO: 2681 - DNA, 20 bp, Glycine max
cgataaagagaggcataagg

SEQ ID NO: 2682 - DNA, 22 bp, Glycine max
tttatccattattcaacaacga

SEQ ID NO: 2683 - DNA, 21 bp, Glycine max
cactttacaatccgactgttg

SEQ ID NO: 2684 - DNA, 24 bp, Glycine max
atttacctaaagtgaatacagaat

SEQ ID NO: 2685 - DNA, 22 bp, Glycine max
tgcgattaaataacttcatctt

SEQ ID NO: 2686 - DNA, 18 bp, Glycine max
cttgttgccgttgaactt

SEQ ID NO: 2687 - DNA, 18 bp, Glycine max
ttcggatcctgagagtga

SEQ ID NO: 2688 - DNA, 18 bp, Glycine max
tccatggattgaggtgac

SEQ ID NO: 2689 - DNA, 19 bp, Glycine max
tttaaaccaagaaaggaaa

SEQ ID NO: 2690 - DNA, 18 bp, Glycine max
tatttgagccaacgccta

SEQ ID NO: 2691 - DNA, 25 bp, Glycine max
aacataaatataacaagctcaacaa

SEQ ID NO: 2692 - DNA, 24 bp, Glycine max
aagataacgattaacatgtcataa

SEQ ID NO: 2693 - DNA, 18 bp, Glycine max
atggagcctgaagatggt

SEQ ID NO: 2694 - DNA, 18 bp, Glycine max
accatcttcaggctccat

SEQ ID NO: 2695 - DNA, 23 bp, Glycine max
tttctttgagaatcatcttcttt

SEQ ID NO: 2696 - DNA, 23 bp, Glycine max
agaaatgcttaatgatatgatcc

SEQ ID NO: 2697 - DNA, 19 bp, Glycine max
gacaattcacgttgtctgc

SEQ ID NO: 2698 - DNA, 18 bp, Glycine max
atcatttcatgcgaccaa

SEQ ID NO: 2699 - DNA, 19 bp, Glycine max
tgcttcgtcatctctgttc

SEQ ID NO: 2700 - DNA, 20 bp, Glycine max
tgtaaagtcatggaaagcaa

SEQ ID NO: 2701 - DNA, 19 bp, Glycine max
gggtaacagtgcaattcag

SEQ ID NO: 2702 - DNA, 19 bp, Glycine max
tgtaacgaggatttggaca

SEQ ID NO: 2703 - DNA, 24 bp, Glycine max
ttgatctctattgttgtttctctc

SEQ ID NO: 2704 - DNA, 19 bp, Glycine max
ccctctagttcaaagtcca

SEQ ID NO: 2705 - DNA, 18 bp, Glycine max
ccagctagggatagagca

SEQ ID NO: 2706 - DNA, 22 bp, Glycine max
caatgtcaacatgtgatacctc

SEQ ID NO: 2707 - DNA, 19 bp, Glycine max
aaagggaccaactgtatct

SEQ ID NO: 2708 - DNA, 18 bp, Glycine max
ggtgctttgctttcatca

SEQ ID NO: 2709 - DNA, 23 bp, Glycine max
cccttatttgttgaagtaactct

SEQ ID NO: 2710 - DNA, 18 bp, Glycine max
agcacatggcaaatcttc

SEQ ID NO: 2711 - DNA, 18 bp, Glycine max
tcgttgttcaggcaattt

SEQ ID NO: 2712 - DNA, 19 bp, Glycine max
tgtgtaaaggttggacctg

SEQ ID NO: 2713 - DNA, 18 bp, Glycine max
ggcagggaaagagttcat

SEQ ID NO: 2714 - DNA, 22 bp, Glycine max
aacataagtcccataagtctcg

SEQ ID NO: 2715 - DNA, 20 bp, Glycine max
tgcattatttctctcccact

SEQ ID NO: 2716 - DNA, 17 bp, Glycine max
ctacgcgctagccaact

SEQ ID NO: 2717 - DNA, 19 bp, Glycine max
tgctgtaatgtttggcttt

SEQ ID NO: 2718 - DNA, 19 bp, Glycine max
tccctagcactaccaaaca

SEQ ID NO: 2719 - DNA, 20 bp, Glycine max
ccaaccaaattaatccctta

SEQ ID NO: 2720 - DNA, 20 bp, Glycine max
ttcacaactgaattcaacca

SEQ ID NO: 2721 - DNA, 18 bp, Glycine max
tggtgcattcctgacttt

SEQ ID NO: 2722 - DNA, 19 bp, Glycine max
tggtagctacttcgcaatg

SEQ ID NO: 2723 - DNA, 17 bp, Glycine max
gacggcttcacaagctc

SEQ ID NO: 2724 - DNA, 19 bp, Glycine max
gggacttgttgagagactt

SEQ ID NO: 2725 - DNA, 18 bp, Glycine max
tctcttcgctttctctgg

SEQ ID NO: 2726 - DNA, 20 bp, Glycine max
aaagggtccttcacataaca

SEQ ID NO: 2727 - DNA, 18 bp, Glycine max
ccaccggtaggctttaac

SEQ ID NO: 2728 - DNA, 20 bp, Glycine max
aaagggtccttcacataaca

SEQ ID NO: 2729 - DNA, 18 bp, Glycine max
ccaccggtaggctttaac

SEQ ID NO: 2730 - DNA, 18 bp, Glycine max
gcacagaagatggtggag

SEQ ID NO: 2731 - DNA, 18 bp, Glycine max
tgtgtgggtgaagattgg

SEQ ID NO: 2732 - DNA, 18 bp, Glycine max
caacacaacccagagagg

SEQ ID NO: 2733 - DNA, 18 bp, Glycine max
ctgtttccacatggcact

SEQ ID NO: 2734 - DNA, 19 bp, Glycine max
aatgtgggcatttatttgt

SEQ ID NO: 2735 - DNA, 19 bp, Glycine max
tcctaatatggtgcccttt

SEQ ID NO: 2736 - DNA, 18 bp, Glycine max
gtcttcgaggaatgcaga

SEQ ID NO: 2737 - DNA, 18 bp, Glycine max
ttcccactgtcagttcca

SEQ ID NO: 2738 - DNA, 17 bp, Glycine max
gcacggcactagtcgtt

SEQ ID NO: 2739 - DNA, 20 bp, Glycine max
ttgttgctctttcaatttca

SEQ ID NO: 2740 - DNA, 20 bp, Glycine max
tgaaattgaaagagcaacaa

SEQ ID NO: 2741 - DNA, 18 bp, Glycine max
gcgtctccgtagcttctt

SEQ ID NO: 2742 - DNA, 19 bp, Glycine max
ttcctttatcgaggatggt

SEQ ID NO: 2743 - DNA, 21 bp, Glycine max
tgaatcacattgaaggtttct

SEQ ID NO: 2744 - DNA, 20 bp, Glycine max
agaaaccttcaatgtgattc

SEQ ID NO: 2745 - DNA, 22 bp, Glycine max
aaagcggaattaatttcttaaa

SEQ ID NO: 2746 - DNA, 20 bp, Glycine max
agaaaccttcaatgtgattc

SEQ ID NO: 2747 - DNA, 22 bp, Glycine max
aaagcggaattaatttcttaaa

SEQ ID NO: 2748 - DNA, 18 bp, Glycine max
cttgggcctttcttctct

SEQ ID NO: 2749 - DNA, 23 bp, Glycine max
ggttctctatcaagtacaagtgg

SEQ ID NO: 2750 - DNA, 24 bp, Glycine max
tgtcttgcatatattcatattcct

SEQ ID NO: 2751 - DNA, 21 bp, Glycine max
tttgtacatgatgaataccag

SEQ ID NO: 2752 - DNA, 18 bp, Glycine max
ccacccatcatcatcttc

SEQ ID NO: 2753 - DNA, 18 bp, Glycine max
gatatccagctggcaaga

SEQ ID NO: 2754 - DNA, 18 bp, Glycine max
ttggtgcagacttacgtg

SEQ ID NO: 2755 - DNA, 16 bp, Glycine max
agcagcttgcaaccaa

SEQ ID NO: 2756 - DNA, 25 bp, Glycine max
tcgtgaataaatatcataagaaaca

SEQ ID NO: 2757 - DNA, 21 bp, Glycine max
gatcgaaatttaaccatcaaa

SEQ ID NO: 2758 - DNA, 18 bp, Glycine max
tcgagcagcttatcaagg

SEQ ID NO: 2759 - DNA, 18 bp, Glycine max
aagggtgagatgctggtt

SEQ ID NO: 2760 - DNA, 18 bp, Glycine max
tcgagcagcttatcaagg

SEQ ID NO: 2761 - DNA, 18 bp, Glycine max
aagggtgagatgctggtt

SEQ ID NO: 2762 - DNA, 20 bp, Glycine max
accaacctagaatggttagc

SEQ ID NO: 2763 - DNA, 18 bp, Glycine max
actagcgaatgcatggaa

SEQ ID NO: 2764 - DNA, 20 bp, Glycine max
accaacctagaatggttagc

SEQ ID NO: 2765 - DNA, 18 bp, Glycine max
actagcgaatgcatggaa

SEQ ID NO: 2766 - DNA, 18 bp, Glycine max
agcccttgggtctagttg

SEQ ID NO: 2767 - DNA, 19 bp, Glycine max
cgctctcgatttctttctt

SEQ ID NO: 2768 - DNA, 18 bp, Glycine max
atcgcaaccgatttatga

SEQ ID NO: 2769 - DNA, 18 bp, Glycine max
tagaggcagcgaaatcag

SEQ ID NO: 2770 - DNA, 21 bp, Glycine max
aacatatttgctcccttacct

SEQ ID NO: 2771 - DNA, 18 bp, Glycine max
ccaaagaaaggaacagca

SEQ ID NO: 2772 - DNA, 21 bp, Glycine max
tcatgatgatcgttaaagaaa

SEQ ID NO: 2773 - DNA, 19 bp, Glycine max
tcacccgattgtacaaagt

SEQ ID NO: 2774 - DNA, 18 bp, Glycine max
cgtaccaggtggtcctta

SEQ ID NO: 2775 - DNA, 22 bp, Glycine max
tccaaactactagaccaatcct

SEQ ID NO: 2776 - DNA, 20 bp, Glycine max
cggaaatccttacactctga

SEQ ID NO: 2777 - DNA, 23 bp, Glycine max
atatgtattgataatggaagaaa

SEQ ID NO: 2778 - DNA, 20 bp, Glycine max
cggaaatccttacactctga

SEQ ID NO: 2779 - DNA, 23 bp, Glycine max
atatgtattgataatggaagaaa

SEQ ID NO: 2780 - DNA, 18 bp, Glycine max
ctttcacgtcgctctcat

SEQ ID NO: 2781 - DNA, 18 bp, Glycine max
gggttcactgttgatgga

SEQ ID NO: 2782 - DNA, 19 bp, Glycine max
ttgaacccactgattcaac

SEQ ID NO: 2783 - DNA, 18 bp, Glycine max
ttcccgtgttagtggaga

SEQ ID NO: 2784 - DNA, 19 bp, Glycine max
ttgaacccactgattcaac

SEQ ID NO: 2785 - DNA, 18 bp, Glycine max
ttcccgtgttagtggaga

SEQ ID NO: 2786 - DNA, 20 bp, Glycine max
tttggcttctctcatctttc

SEQ ID NO: 2787 - DNA, 20 bp, Glycine max
gaattcacgagacttcgttt

SEQ ID NO: 2788 - DNA, 20 bp, Glycine max
tttggcttctctcatctttc

SEQ ID NO: 2789 - DNA, 20 bp, Glycine max
gaattcacgagacttcgttt

SEQ ID NO: 2790 - DNA, 19 bp, Glycine max
tttccagccacaagtatca

SEQ ID NO: 2791 - DNA, 19 bp, Glycine max
tgcatgtgtgtgagaagaa

SEQ ID NO: 2792 - DNA, 18 bp, Glycine max
ccactcccgatatacgac

SEQ ID NO: 2793 - DNA, 21 bp, Glycine max
agaagctttcttgatctttcc

SEQ ID NO: 2794 - DNA, 21 bp, Glycine max
acgtttcttgaaatcacattc

SEQ ID NO: 2795 - DNA, 25 bp, Glycine max
tttctttatcacatttgtaacttca

SEQ ID NO: 2796 - DNA, 18 bp, Glycine max
gaccgaatttgaaaccaa

SEQ ID NO: 2797 - DNA, 18 bp, Glycine max
tccaagcttctgcaattt

SEQ ID NO: 2798 - DNA, 18 bp, Glycine max
gaagcttggaacgagtcc

SEQ ID NO: 2799 - DNA, 18 bp, Glycine max
cagcgtccgtcagattac

SEQ ID NO: 2800 - DNA, 19 bp, Glycine max
ttgagttcaatgaggcaaa

SEQ ID NO: 2801 - DNA, 18 bp, Glycine max
tcgtaaagcaaaccatgc

SEQ ID NO: 2802 - DNA, 19 bp, Glycine max
tggatcttggatctgtgtc

SEQ ID NO: 2803 - DNA, 18 bp, Glycine max
cagtgccctcatgacaat

SEQ ID NO: 2804 - DNA, 18 bp, Glycine max
tccttcttcacccatcaa

SEQ ID NO: 2805 - DNA, 18 bp, Glycine max
agcttcttgttgtgcttt

SEQ ID NO: 2806 - DNA, 18 bp, Glycine max
accgtttagtgacggtga

SEQ ID NO: 2807 - DNA, 20 bp, Glycine max
aaatttaatccctttgaaat

SEQ ID NO: 2808 - DNA, 20 bp, Glycine max
gggattagacacaacatcaa

SEQ ID NO: 2809 - DNA, 22 bp, Glycine max
cattgtttatcctgtaatttgc

SEQ ID NO: 2810 - DNA, 19 bp, Glycine max
tcgacctgtagaagcaatg

SEQ ID NO: 2811 - DNA, 18 bp, Glycine max
tcccgagaaatagtcacg

SEQ ID NO: 2812 - DNA, 17 bp, Glycine max
gcataagcctgcagtgg

SEQ ID NO: 2813 - DNA, 18 bp, Glycine max
cgatggacagaaccaaca

SEQ ID NO: 2814 - DNA, 19 bp, Glycine max
ccgaataacatttgcttca

SEQ ID NO: 2815 - DNA, 19 bp, Glycine max
agcatagggaaatgcaact

SEQ ID NO: 2816 - DNA, 24 bp, Glycine max
tttgatacaacatatcaagaaaga

SEQ ID NO: 2817 - DNA, 23 bp, Glycine max
aattctgacagttacatcaacaa

SEQ ID NO: 2818 - DNA, 18 bp, Glycine max
aatcatccttcacgttgc

SEQ ID NO: 2819 - DNA, 18 bp, Glycine max
ggtgatcgttgttggaaa

SEQ ID NO: 2820 - DNA, 19 bp, Glycine max
tctttatcgcatacccaaa

SEQ ID NO: 2821 - DNA, 18 bp, Glycine max
gccattacaaccaagcaa

SEQ ID NO: 2822 - DNA, 18 bp, Glycine max
cgcagaggcaaagataga

SEQ ID NO: 2823 - DNA, 18 bp, Glycine max
ggaagcaatagcgatgaa

SEQ ID NO: 2824 - DNA, 18 bp, Glycine max
gagaagcacgatttcacg

SEQ ID NO: 2825 - DNA, 17 bp, Glycine max
tccgtcaaccctttcac

SEQ ID NO: 2826 - DNA, 17 bp, Glycine max
aggctgtctcaggcttt

SEQ ID NO: 2827 - DNA, 25 bp, Glycine max
caacattacttgacttatttcaaac

SEQ ID NO: 2828 - DNA, 18 bp, Glycine max
caatcaggtaagccaacg

SEQ ID NO: 2829 - DNA, 19 bp, Glycine max
agggagagtgtcaagccta

SEQ ID NO: 2830 - DNA, 19 bp, Glycine max
tgacactctccctctacca

SEQ ID NO: 2831 - DNA, 19 bp, Glycine max
gcctaccgtatggtctagc

SEQ ID NO: 2832 - DNA, 18 bp, Glycine max
acgcttaacagcataccc

SEQ ID NO: 2833 - DNA, 18 bp, Glycine max
aattgtgctggagagtgg

SEQ ID NO: 2834 - DNA, 22 bp, Glycine max
aaacacaaacatacaatgacta

SEQ ID NO: 2835 - DNA, 20 bp, Glycine max
ttgtatcacaagtggtggtt

SEQ ID NO: 2836 - DNA, 18 bp, Glycine max
tcgttagcatcctggtgt

SEQ ID NO: 2837 - DNA, 18 bp, Glycine max
gccacgagctttgtgtta

SEQ ID NO: 2838 - DNA, 18 bp, Glycine max
tcgttagcatcctggtgt

SEQ ID NO: 2839 - DNA, 18 bp, Glycine max
gccacgagctttgtgtta

SEQ ID NO: 2840 - DNA, 18 bp, Glycine max
tcacgtctcaggataccg

SEQ ID NO: 2841 - DNA, 18 bp, Glycine max
tgccacctctgactctgt

SEQ ID NO: 2842 - DNA, 18 bp, Glycine max
agattcgtccgctagctt

SEQ ID NO: 2843 - DNA, 18 bp, Glycine max
tgcagacacttggaatca

SEQ ID NO: 2844 - DNA, 20 bp, Glycine max
aatgaaagcatgaccatgta

SEQ ID NO: 2845 - DNA, 25 bp, Glycine max
tttctcgtgctattatactatttga

SEQ ID NO: 2846 - DNA, 20 bp, Glycine max
aatgaaagcatgaccatgta

SEQ ID NO: 2847 - DNA, 23 bp, Glycine max
aattattgaattggatattcctt

SEQ ID NO: 2848 - DNA, 20 bp, Glycine max
agaatgaaacgtgatcaaac

SEQ ID NO: 2849 - DNA, 19 bp, Glycine max
cgctttatagggcttatcg

SEQ ID NO: 2850 - DNA, 18 bp, Glycine max
tcatgatgtccgtggatt

SEQ ID NO: 2851 - DNA, 19 bp, Glycine max
aatccaatatggtgtgcaa

SEQ ID NO: 2852 - DNA, 19 bp, Glycine max
cgatgacgaaactgaaaga

SEQ ID NO: 2853 - DNA, 17 bp, Glycine max
taggagtcgtggctggt

SEQ ID NO: 2854 - DNA, 17 bp, Glycine max
actgcgcagcagtgata

SEQ ID NO: 2855 - DNA, 22 bp, Glycine max
ggatggataatatgatcaacaa

SEQ ID NO: 2856 - DNA, 18 bp, Glycine max
aaagaaagaggcaagacg

SEQ ID NO: 2857 - DNA, 22 bp, Glycine max
aatttaaatcgtaatggcctaa

SEQ ID NO: 2858 - DNA, 18 bp, Glycine max
ttgtgaggcccaaataag

SEQ ID NO: 2859 - DNA, 20 bp, Glycine max
ggttcaagtgattgtgtgtg

SEQ ID NO: 2860 - DNA, 18 bp, Glycine max
aatgcgcgtgtagaagag

SEQ ID NO: 2861 - DNA, 18 bp, Glycine max
cgcttcttccaaatgtgt

SEQ ID NO: 2862 - DNA, 18 bp, Glycine max
tcatctgattgcctgcat

SEQ ID NO: 2863 - DNA, 19 bp, Glycine max
ttccaaacacaaacacaca

SEQ ID NO: 2864 - DNA, 18 bp, Glycine max
actatggccacaaccaca

SEQ ID NO: 2865 - DNA, 18 bp, Glycine max
agagtccacagcagcaaa

SEQ ID NO: 2866 - DNA, 18 bp, Glycine max
taaggcctctcaccattt

SEQ ID NO: 2867 - DNA, 18 bp, Glycine max
cctcctcgtactcggttt

SEQ ID NO: 2868 - DNA, 18 bp, Glycine max
ttatttgccgctcaatgt

SEQ ID NO: 2869 - DNA, 18 bp, Glycine max
acctgtcgagtgtcgtgt

SEQ ID NO: 2870 - DNA, 18 bp, Glycine max
gctgtggcacaatgactt

SEQ ID NO: 2871 - DNA, 18 bp, Glycine max
gtgctgctgctaatggtt

SEQ ID NO: 2872 - DNA, 18 bp, Glycine max
catgcttcctcaccagtt

SEQ ID NO: 2873 - DNA, 19 bp, Glycine max
tgcggaagagtgagtattg

SEQ ID NO: 2874 - DNA, 19 bp, Glycine max
ttcccttctcttcttccac

SEQ ID NO: 2875 - DNA, 18 bp, Glycine max
tatcaccacctcgcctta

SEQ ID NO: 2876 - DNA, 18 bp, Glycine max
taaggcgaggtggtgata

SEQ ID NO: 2877 - DNA, 18 bp, Glycine max
tcgacctaaatcctttgc

SEQ ID NO: 2878 - DNA, 19 bp, Glycine max
catgccttatggatgtttg

SEQ ID NO: 2879 - DNA, 20 bp, Glycine max
agccaaatttagaaccgata

SEQ ID NO: 2880 - DNA, 20 bp, Glycine max
ttgaagacaaattggacaaa

SEQ ID NO: 2881 - DNA, 22 bp, Glycine max
gctcacgtactaattcagatca

SEQ ID NO: 2882 - DNA, 25 bp, Glycine max
caatacaaccattagtaaatcatgt

SEQ ID NO: 2883 - DNA, 19 bp, Glycine max
tgtcctaagagcatccatt

SEQ ID NO: 2884 - DNA, 19 bp, Glycine max
tgcaatgtaatggttcagg

SEQ ID NO: 2885 - DNA, 23 bp, Glycine max
tttgctagttaggaagagagaaa

SEQ ID NO: 2886 - DNA, 19 bp, Glycine max
agaagagactttcccatcg

SEQ ID NO: 2887 - DNA, 21 bp, Glycine max
gggatgattaaacaataccat

SEQ ID NO: 2888 - DNA, 18 bp, Glycine max
tcatcggtgaagaaggag

SEQ ID NO: 2889 - DNA, 17 bp, Glycine max
tctcattcccgacaacc

SEQ ID NO: 2890 - DNA, 21 bp, Glycine max
aatgtgacttaatgacgtgtt

SEQ ID NO: 2891 - DNA, 18 bp, Glycine max
agggacatgatcaccact

SEQ ID NO: 2892 - DNA, 20 bp, Glycine max
agtcatgattgccgatattt

SEQ ID NO: 2893 - DNA, 19 bp, Glycine max
tttaatgtgcttgcttgct

SEQ ID NO: 2894 - DNA, 18 bp, Glycine max
ggttagaccggttggttt

SEQ ID NO: 2895 - DNA, 20 bp, Glycine max
tggagacttgcatatcattg

SEQ ID NO: 2896 - DNA, 19 bp, Glycine max
tcatcacaaccatccttct

SEQ ID NO: 2897 - DNA, 23 bp, Glycine max
tgataagactacaaccacaacaa

SEQ ID NO: 2898 - DNA, 18 bp, Glycine max
tttccagtggttggtttg

SEQ ID NO: 2899 - DNA, 20 bp, Glycine max
aaagcaagaagttcaaatgc

SEQ ID NO: 2900 - DNA, 21 bp, Glycine max
gctcatgtaatccgtatcttg

SEQ ID NO: 2901 - DNA, 20 bp, Glycine max
caattacaactgtgcaccaa

SEQ ID NO: 2902 - DNA, 18 bp, Glycine max
tagtccagcattcgttgc

SEQ ID NO: 2903 - DNA, 18 bp, Glycine max
ctcccttcctttgaccat

SEQ ID NO: 2904 - DNA, 19 bp, Glycine max
tggttcctcatgaaacaaa

SEQ ID NO: 2905 - DNA, 21 bp, Glycine max
ccatgtggtagttaggagttt

SEQ ID NO: 2906 - DNA, 20 bp, Glycine max
accttaacaaagacccattt

SEQ ID NO: 2907 - DNA, 20 bp, Glycine max
catgtcacgttgacaggtaa

SEQ ID NO: 2908 - DNA, 18 bp, Glycine max
tgcctatatgcacttgct

SEQ ID NO: 2909 - DNA, 18 bp, Glycine max
atccaaatgcaagacacg

SEQ ID NO: 2910 - DNA, 17 bp, Glycine max
atatgcccagcaaccac

SEQ ID NO: 2911 - DNA, 18 bp, Glycine max
cctgatccaggacgtaca

SEQ ID NO: 2912 - DNA, 19 bp, Glycine max
ggcgtttctgagaagaaga

SEQ ID NO: 2913 - DNA, 16 bp, Glycine max
ccaccaacaccagcaa

SEQ ID NO: 2914 - DNA, 20 bp, Glycine max
agacagcccatcttaaatca

SEQ ID NO: 2915 - DNA, 18 bp, Glycine max
tctcgcaattgggttaat

SEQ ID NO: 2916 - DNA, 19 bp, Glycine max
ggtccacatttatgaacca

SEQ ID NO: 2917 - DNA, 18 bp, Glycine max
gcaccacattagcattcc

SEQ ID NO: 2918 - DNA, 19 bp, Glycine max
cctagggtactcagccaat

SEQ ID NO: 2919 - DNA, 20 bp, Glycine max
gaggtggaattgtaacatcc

SEQ ID NO: 2920 - DNA, 19 bp, Glycine max
cctagggtactcagccaat

SEQ ID NO: 2921 - DNA, 21 bp, Glycine max
ttgcttatgtaacatcccaat

SEQ ID NO: 2922 - DNA, 18 bp, Glycine max
caggacaggtgtggagaa

SEQ ID NO: 2923 - DNA, 18 bp, Glycine max
gccttgggtagtgttgtg

SEQ ID NO: 2924 - DNA, 18 bp, Glycine max
tccacaacaaaccaaacc

SEQ ID NO: 2925 - DNA, 18 bp, Glycine max
aattggaacaagctgctg

SEQ ID NO: 2926 - DNA, 18 bp, Glycine max
ccaattccaacacaagga

SEQ ID NO: 2927 - DNA, 20 bp, Glycine max
ggagagggaagaaacatagg

SEQ ID NO: 2928 - DNA, 20 bp, Glycine max
ttccttgaatatctggcaat

SEQ ID NO: 2929 - DNA, 20 bp, Glycine max
cccactttctgaagatcaag

SEQ ID NO: 2930 - DNA, 19 bp, Glycine max
cccgctctcttgttctatt

SEQ ID NO: 2931 - DNA, 19 bp, Glycine max
ctcccaagtgacaacctct

SEQ ID NO: 2932 - DNA, 18 bp, Glycine max
cgttgctcaaccacctta

SEQ ID NO: 2933 - DNA, 18 bp, Glycine max
gggaacaagcaacaacaa

SEQ ID NO: 2934 - DNA, 19 bp, Glycine max
tcatcatcatcacctacgc

SEQ ID NO: 2935 - DNA, 18 bp, Glycine max
agaactgacggagccact

SEQ ID NO: 2936 - DNA, 19 bp, Glycine max
tcatcatcatcacctacgc

SEQ ID NO: 2937 - DNA, 18 bp, Glycine max
agaactgacggagccact

SEQ ID NO: 2938 - DNA, 18 bp, Glycine max
ccggaggtatacaccaaa

SEQ ID NO: 2939 - DNA, 20 bp, Glycine max
aacaaatccaacttctctcg

SEQ ID NO: 2940 - DNA, 19 bp, Glycine max
gggtacatcatccgataca

SEQ ID NO: 2941 - DNA, 18 bp, Glycine max
atttggttagtgggcaaa

SEQ ID NO: 2942 - DNA, 18 bp, Glycine max
gatccacacagcaccttg

SEQ ID NO: 2943 - DNA, 19 bp, Glycine max
tgatgcaacagaaatacga

SEQ ID NO: 2944 - DNA, 20 bp, Glycine max
cctgaaatatgggtgtcttc

SEQ ID NO: 2945 - DNA, 18 bp, Glycine max
caggttgaggcaacactc

SEQ ID NO: 2946 - DNA, 18 bp, Glycine max
ggaacctttggcaactct

SEQ ID NO: 2947 - DNA, 18 bp, Glycine max
gttggtgcatgatttcct

SEQ ID NO: 2948 - DNA, 19 bp, Glycine max
tcagattcaaaccgaagaa

SEQ ID NO: 2949 - DNA, 18 bp, Glycine max
ccttctcacggtagcaaa

SEQ ID NO: 2950 - DNA, 18 bp, Glycine max
tatcgtttcgtccctgtg

SEQ ID NO: 2951 - DNA, 17 bp, Glycine max
ctaattccacccgcaac

SEQ ID NO: 2952 - DNA, 18 bp, Glycine max
aactcattggcaagtgga

SEQ ID NO: 2953 - DNA, 18 bp, Glycine max
aagctcctgtggacttga

SEQ ID NO: 2954 - DNA, 18 bp, Glycine max
ccacaaatccaaattcca

SEQ ID NO: 2955 - DNA, 19 bp, Glycine max
tccataggaaatcaaagca

SEQ ID NO: 2956 - DNA, 21 bp, Glycine max
gtcggagtagtcgagtagaca

SEQ ID NO: 2957 - DNA, 18 bp, Glycine max
taccgagtccgatgaaac

SEQ ID NO: 2958 - DNA, 24 bp, Glycine max
aggtatgcgttatattcatattca

SEQ ID NO: 2959 - DNA, 21 bp, Glycine max
tcattagtatgaggtgggttt

SEQ ID NO: 2960 - DNA, 24 bp, Glycine max
tgagattagacattcacatttaca

SEQ ID NO: 2961 - DNA, 18 bp, Glycine max
aagagcagggctgatatg

SEQ ID NO: 2962 - DNA, 20 bp, Glycine max
aacatgagagaattgggaaa

SEQ ID NO: 2963 - DNA, 20 bp, Glycine max
gaagaaaggttggaaacaca

SEQ ID NO: 2964 - DNA, 20 bp, Glycine max
aggtgctcatacatccaaac

SEQ ID NO: 2965 - DNA, 20 bp, Glycine max
catatacaacgcaagaaacg

SEQ ID NO: 2966 - DNA, 19 bp, Glycine max
ggtctgaactgacccattt

SEQ ID NO: 2967 - DNA, 19 bp, Glycine max
caaagtctgctggtttcaa

SEQ ID NO: 2968 - DNA, 18 bp, Glycine max
acacaatcgccaaagaga

SEQ ID NO: 2969 - DNA, 19 bp, Glycine max
tgagaaattgcttctccaa

SEQ ID NO: 2970 - DNA, 18 bp, Glycine max
tttcattacgtgcgtttg

SEQ ID NO: 2971 - DNA, 18 bp, Glycine max
cagggtggatgatacgaa

SEQ ID NO: 2972 - DNA, 18 bp, Glycine max
tttcattacgtgcgtttg

SEQ ID NO: 2973 - DNA, 18 bp, Glycine max
cagggtggatgatacgaa

SEQ ID NO: 2974 - DNA, 19 bp, Glycine max
cgcgtctttctttcttctt

SEQ ID NO: 2975 - DNA, 18 bp, Glycine max
actcgcacacacacacat

SEQ ID NO: 2976 - DNA, 20 bp, Glycine max
aagcaatcaagaaagaaagc

SEQ ID NO: 2977 - DNA, 19 bp, Glycine max
tgaaacacctcagattcca

SEQ ID NO: 2978 - DNA, 18 bp, Glycine max
ttgctatgccaacaatga

SEQ ID NO: 2979 - DNA, 19 bp, Glycine max
ttggttgtagctgcttgtc

SEQ ID NO: 2980 - DNA, 18 bp, Glycine max
cacatcgtcatcccaaac

SEQ ID NO: 2981 - DNA, 19 bp, Glycine max
tgctctttattgggtgttg

SEQ ID NO: 2982 - DNA, 20 bp, Glycine max
aacctcgagcatatgagaaa

SEQ ID NO: 2983 - DNA, 20 bp, Glycine max
acatttacgatccaatgtca

SEQ ID NO: 2984 - DNA, 18 bp, Glycine max
aaagggagagccatcatc

SEQ ID NO: 2985 - DNA, 18 bp, Glycine max
tggaaatggagaaagcaa

SEQ ID NO: 2986 - DNA, 20 bp, Glycine max
tcaggagagaaatgttgctt

SEQ ID NO: 2987 - DNA, 18 bp, Glycine max
atgggagtgggtcaatct

SEQ ID NO: 2988 - DNA, 18 bp, Glycine max
ccaagaatctgcttggaa

SEQ ID NO: 2989 - DNA, 18 bp, Glycine max
ttccaaacggtccataag

SEQ ID NO: 2990 - DNA, 18 bp, Glycine max
ggaccgtttggaagagat

SEQ ID NO: 2991 - DNA, 20 bp, Glycine max
cagtcaattgtagtgggaaa

SEQ ID NO: 2992 - DNA, 20 bp, Glycine max
tgcataactcgatctcttga

SEQ ID NO: 2993 - DNA, 21 bp, Glycine max
ttcatgtaaactacacgcaca

SEQ ID NO: 2994 - DNA, 20 bp, Glycine max
tgcataactcgatctcttga

SEQ ID NO: 2995 - DNA, 22 bp, Glycine max
tcaaataataatcacctgcaaa

SEQ ID NO: 2996 - DNA, 16 bp, Glycine max
ccattgccctgcatgt

SEQ ID NO: 2997 - DNA, 18 bp, Glycine max
aatccgaactgcatcgta

SEQ ID NO: 2998 - DNA, 21 bp, Glycine max
tcaatcctgctagataaatgc

SEQ ID NO: 2999 - DNA, 20 bp, Glycine max
agcccatgattaaagtgaaa

SEQ ID NO: 3000 - DNA, 20 bp, Glycine max
tggtgaatcatgtgcataaa

SEQ ID NO: 3001 - DNA, 23 bp, Glycine max
accaattaagagagtagatcaaa

SEQ ID NO: 3002 - DNA, 20 bp, Glycine max
tggtggttagatccaatttc

SEQ ID NO: 3003 - DNA, 17 bp, Glycine max
cctcttgcaccatcgac

SEQ ID NO: 3004 - DNA, 20 bp, Glycine max
ggaactgtacacatgcctta

SEQ ID NO: 3005 - DNA, 20 bp, Glycine max
tttgtggtatttcatttgga

SEQ ID NO: 3006 - DNA, 18 bp, Glycine max
ttcgagtcattccagtcg

SEQ ID NO: 3007 - DNA, 25 bp, Glycine max
agttatgaaagttatacgatatgat

SEQ ID NO: 3008 - DNA, 18 bp, Glycine max
attccagtcgcagtaacg

SEQ ID NO: 3009 - DNA, 18 bp, Glycine max
agccacaaagtcggatta

SEQ ID NO: 3010 - DNA, 18 bp, Glycine max
aatccgactttgtggcta

SEQ ID NO: 3011 - DNA, 19 bp, Glycine max
gcccgatgtacattacaaa

SEQ ID NO: 3012 - DNA, 20 bp, Glycine max
aacagatcactggtatgcaa

SEQ ID NO: 3013 - DNA, 18 bp, Glycine max
ggtggtaagtggcgttag

SEQ ID NO: 3014 - DNA, 17 bp, Glycine max
ttcagcatttcgtggtg

SEQ ID NO: 3015 - DNA, 19 bp, Glycine max
tgttgaagacattgggtaa

SEQ ID NO: 3016 - DNA, 18 bp, Glycine max
taactcttgcgtgctcct

SEQ ID NO: 3017 - DNA, 18 bp, Glycine max
ccctgggacatatactgg

SEQ ID NO: 3018 - DNA, 20 bp, Glycine max
tttctgaaatgtgttgaaat

SEQ ID NO: 3019 - DNA, 18 bp, Glycine max
cgtggaccaagttacagc

SEQ ID NO: 3020 - DNA, 20 bp, Glycine max
tttctgaaatgtgttgaaat

SEQ ID NO: 3021 - DNA, 18 bp, Glycine max
cgtggaccaagttacagc

SEQ ID NO: 3022 - DNA, 22 bp, Glycine max
ggagatcctagacacttatgga

SEQ ID NO: 3023 - DNA, 18 bp, Glycine max
tgccaatgattgaaggaa

SEQ ID NO: 3024 - DNA, 20 bp, Glycine max
aaccattgatctccttacct

SEQ ID NO: 3025 - DNA, 19 bp, Glycine max
acgggtaccaaattaagaa

SEQ ID NO: 3026 - DNA, 18 bp, Glycine max
ggaaccacaactccgatt

SEQ ID NO: 3027 - DNA, 20 bp, Glycine max
gcacaaagaagaaatttgga

SEQ ID NO: 3028 - DNA, 19 bp, Glycine max
ccgaatagggtaatgggta

SEQ ID NO: 3029 - DNA, 19 bp, Glycine max
ccctggtagcctgtacttg

SEQ ID NO: 3030 - DNA, 24 bp, Glycine max
tgattcaatacaaaggaaattaag

SEQ ID NO: 3031 - DNA, 18 bp, Glycine max
accctgtggtaacggatt

SEQ ID NO: 3032 - DNA, 18 bp, Glycine max
tgtgccaataatgctcaa

SEQ ID NO: 3033 - DNA, 25 bp, Glycine max
aagatttaatatttctttagtgctg

SEQ ID NO: 3034 - DNA, 20 bp, Glycine max
aaattaaagttgggttgaaa

SEQ ID NO: 3035 - DNA, 18 bp, Glycine max
acaagtttcgttgggtca

SEQ ID NO: 3036 - DNA, 20 bp, Glycine max
ccttaagtggagattcatgg

SEQ ID NO: 3037 - DNA, 20 bp, Glycine max
ccctatcaacatcaacaagg

SEQ ID NO: 3038 - DNA, 18 bp, Glycine max
tcgtcagcttgaatgaca

SEQ ID NO: 3039 - DNA, 18 bp, Glycine max
ctcgtcctatgctcaacc

SEQ ID NO: 3040 - DNA, 20 bp, Glycine max
ttcgaaacgtgtcatgtaga

SEQ ID NO: 3041 - DNA, 19 bp, Glycine max
tcgaatactcaaagggtga

SEQ ID NO: 3042 - DNA, 20 bp, Glycine max
aatattgtgcaaatgggttt

SEQ ID NO: 3043 - DNA, 22 bp, Glycine max
aagaaggatgaagaaattgtaa

SEQ ID NO: 3044 - DNA, 20 bp, Glycine max
aatattgtgcaaatgggttt

SEQ ID NO: 3045 - DNA, 21 bp, Glycine max
ataagaaggatgaagaaattg

SEQ ID NO: 3046 - DNA, 20 bp, Glycine max
tgcacaatgagatttgaagt

SEQ ID NO: 3047 - DNA, 19 bp, Glycine max
ttcgattaccctccctaaa

SEQ ID NO: 3048 - DNA, 24 bp, Glycine max
ttgtttaattcactttaaagaagc

SEQ ID NO: 3049 - DNA, 20 bp, Glycine max
tcaaatctcatggaccatct

SEQ ID NO: 3050 - DNA, 18 bp, Glycine max
cgaaattgatttccatcg

SEQ ID NO: 3051 - DNA, 22 bp, Glycine max
ttcttgttatctaactgcatca

SEQ ID NO: 3052 - DNA, 18 bp, Glycine max
tggaaggattggttgaga

SEQ ID NO: 3053 - DNA, 21 bp, Glycine max
cgaaattgactaattcacaaa

SEQ ID NO: 3054 - DNA, 18 bp, Glycine max
aggatctgccaattctga

SEQ ID NO: 3055 - DNA, 20 bp, Glycine max
tgtacctatgcattcccatc

SEQ ID NO: 3056 - DNA, 18 bp, Glycine max
ccatgttggcatgaagat

SEQ ID NO: 3057 - DNA, 18 bp, Glycine max
ccaatttcctcccttgac

SEQ ID NO: 3058 - DNA, 19 bp, Glycine max
ttggttgtactttgccaac

SEQ ID NO: 3059 - DNA, 20 bp, Glycine max
tgccagaagaaagtaccagt

SEQ ID NO: 3060 - DNA, 20 bp, Glycine max
tcagtcattgtctttgagga

SEQ ID NO: 3061 - DNA, 20 bp, Glycine max
gaatgcagtttcaaatttcc

SEQ ID NO: 3062 - DNA, 18 bp, Glycine max
gcagcaaatgtctcgaat

SEQ ID NO: 3063 - DNA, 18 bp, Glycine max
gcaggttcacgaggtcta

SEQ ID NO: 3064 - DNA, 18 bp, Glycine max
tggatctgattccacctg

SEQ ID NO: 3065 - DNA, 18 bp, Glycine max
tgtatgggcgctaagttg

SEQ ID NO: 3066 - DNA, 18 bp, Glycine max
agctgcatcacctctcag

SEQ ID NO: 3067 - DNA, 19 bp, Glycine max
gccctgatttcaatttagc

SEQ ID NO: 3068 - DNA, 20 bp, Glycine max
cagggctacatttaaggaca

SEQ ID NO: 3069 - DNA, 19 bp, Glycine max
tgttctaggcatttggtca

SEQ ID NO: 3070 - DNA, 20 bp, Glycine max
gggctacatttaaggacaaa

SEQ ID NO: 3071 - DNA, 19 bp, Glycine max
tgttctaggcatttggtca

SEQ ID NO: 3072 - DNA, 18 bp, Glycine max
agcaacgctggattagaa

SEQ ID NO: 3073 - DNA, 18 bp, Glycine max
tgccattacaacaatgga

SEQ ID NO: 3074 - DNA, 18 bp, Glycine max
caccaaacacctcctcaa

SEQ ID NO: 3075 - DNA, 19 bp, Glycine max
ttcttgaagtttgcctgtg

SEQ ID NO: 3076 - DNA, 19 bp, Glycine max
agattagggaaccattgga

SEQ ID NO: 3077 - DNA, 21 bp, Glycine max
ccaaatagaaatttcgtgtca

SEQ ID NO: 3078 - DNA, 18 bp, Glycine max
ccttgagtcgtccctgta

SEQ ID NO: 3079 - DNA, 19 bp, Glycine max
tgcattgtggttaatggtt

SEQ ID NO: 3080 - DNA, 18 bp, Glycine max
cctgtgaagggtgctgta

SEQ ID NO: 3081 - DNA, 18 bp, Glycine max
aatgtggcaacatccatt

SEQ ID NO: 3082 - DNA, 18 bp, Glycine max
taaaccgttctcgtcgaa

SEQ ID NO: 3083 - DNA, 20 bp, Glycine max
accaataagattgccttacg

SEQ ID NO: 3084 - DNA, 18 bp, Glycine max
cgaaattcgtaaggcaat

SEQ ID NO: 3085 - DNA, 23 bp, Glycine max
tttgcttgatttagttaaggttt

SEQ ID NO: 3086 - DNA, 19 bp, Glycine max
acacacacacacacacaca

SEQ ID NO: 3087 - DNA, 23 bp, Glycine max
tttgcttgatttagttaaggttt

SEQ ID NO: 3088 - DNA, 19 bp, Glycine max
cgtgaagatgaaggatgaa

SEQ ID NO: 3089 - DNA, 21 bp, Glycine max
aaactaagctcgaaccttaaa

SEQ ID NO: 3090 - DNA, 25 bp, Glycine max
tccctaaataaattaataaatccaa

SEQ ID NO: 3091 - DNA, 21 bp, Glycine max
tgaccctctctctctctctct

SEQ ID NO: 3092 - DNA, 25 bp, Glycine max
tccctaaataaattaataaatccaa

SEQ ID NO: 3093 - DNA, 18 bp, Glycine max
aatcatgtggcatgtgtg

SEQ ID NO: 3094 - DNA, 25 bp, Glycine max
tttctatccactttatttatcacct

SEQ ID NO: 3095 - DNA, 18 bp, Glycine max
atgattgtttcgggcttt

SEQ ID NO: 3096 - DNA, 18 bp, Glycine max
aacaaggccacactctca

SEQ ID NO: 3097 - DNA, 20 bp, Glycine max
aaatggtgcaagtgtgtatg

SEQ ID NO: 3098 - DNA, 20 bp, Glycine max
tttcagctgctactcaaagt

SEQ ID NO: 3099 - DNA, 18 bp, Glycine max
agagcccatttgtttcaa

SEQ ID NO: 3100 - DNA, 19 bp, Glycine max
aatggacaatgagaggaca

SEQ ID NO: 3101 - DNA, 18 bp, Glycine max
cgtagaccctccttccaa

SEQ ID NO: 3102 - DNA, 18 bp, Glycine max
gccaacggttctcctatc

SEQ ID NO: 3103 - DNA, 18 bp, Glycine max
ggaatctcctctggcttc

SEQ ID NO: 3104 - DNA, 18 bp, Glycine max
tttcaactgccacacaaa

SEQ ID NO: 3105 - DNA, 21 bp, Glycine max
aaagggatatttgaaaggaaa

SEQ ID NO: 3106 - DNA, 23 bp, Glycine max
caaatattccctctaacataaca

SEQ ID NO: 3107 - DNA, 24 bp, Glycine max
agaacatgaatttcacataaagaa

SEQ ID NO: 3108 - DNA, 23 bp, Glycine max
aaattgtaagaggaatgagtgaa

SEQ ID NO: 3109 - DNA, 19 bp, Glycine max
cgctttaggctatgtttga

SEQ ID NO: 3110 - DNA, 18 bp, Glycine max
cgcaactcagatgcatta

SEQ ID NO: 3111 - DNA, 19 bp, Glycine max
aatgatcatcgtccactga

SEQ ID NO: 3112 - DNA, 18 bp, Glycine max
cgcaactcagatgcatta

SEQ ID NO: 3113 - DNA, 19 bp, Glycine max
aatgatcatcgtccactga

SEQ ID NO: 3114 - DNA, 18 bp, Glycine max
tgattgcagagcatcctt

SEQ ID NO: 3115 - DNA, 19 bp, Glycine max
tttcatgaaggcagttgaa

SEQ ID NO: 3116 - DNA, 18 bp, Glycine max
ggcaaagcacgttcataa

SEQ ID NO: 3117 - DNA, 18 bp, Glycine max
ttcttcccatggaatcct

SEQ ID NO: 3118 - DNA, 19 bp, Glycine max
ggaatcaagtgagggagaa

SEQ ID NO: 3119 - DNA, 21 bp, Glycine max
tctttcttaatcgcctaatca

SEQ ID NO: 3120 - DNA, 24 bp, Glycine max
tttaaataaattgaccctaaattg

SEQ ID NO: 3121 - DNA, 21 bp, Glycine max
tcgagtcatgatgatatgtga

SEQ ID NO: 3122 - DNA, 19 bp, Glycine max
tttccaatctaaatccaaa

SEQ ID NO: 3123 - DNA, 18 bp, Glycine max
tttgggctcattagcttg

SEQ ID NO: 3124 - DNA, 18 bp, Glycine max
gttgttagccatggatcg

SEQ ID NO: 3125 - DNA, 18 bp, Glycine max
aatgtgaagccacacctg

SEQ ID NO: 3126 - DNA, 18 bp, Glycine max
aaacgcattccgtacatt

SEQ ID NO: 3127 - DNA, 20 bp, Glycine max
agcacatgacaaatcacatt

SEQ ID NO: 3128 - DNA, 20 bp, Glycine max
tgtgatttgtcatgtgctaa

SEQ ID NO: 3129 - DNA, 21 bp, Glycine max
ttcctccaaacacatcttaaa

SEQ ID NO: 3130 - DNA, 19 bp, Glycine max
tggttccataagactctcg

SEQ ID NO: 3131 - DNA, 18 bp, Glycine max
tcacgggtgaacaacatt

SEQ ID NO: 3132 - DNA, 23 bp, Glycine max
tgagacatacatgaatttcagag

SEQ ID NO: 3133 - DNA, 17 bp, Glycine max
tttggttcccgtgtttc

SEQ ID NO: 3134 - DNA, 18 bp, Glycine max
attctgaaccctgcatgt

SEQ ID NO: 3135 - DNA, 18 bp, Glycine max
agaaggagcacgtgatga

SEQ ID NO: 3136 - DNA, 18 bp, Glycine max
ttcaacttgcaacacacg

SEQ ID NO: 3137 - DNA, 18 bp, Glycine max
acacggttgaagcattgt

SEQ ID NO: 3138 - DNA, 20 bp, Glycine max
cccaacataattccaacttc

SEQ ID NO: 3139 - DNA, 18 bp, Glycine max
gcagagcatcccaaatta

SEQ ID NO: 3140 - DNA, 21 bp, Glycine max
aggcttcttctgtctcaattt

SEQ ID NO: 3141 - DNA, 18 bp, Glycine max
agaggctaaggcttgagg

SEQ ID NO: 3142 - DNA, 19 bp, Glycine max
tgcattggatgttctacca

SEQ ID NO: 3143 - DNA, 19 bp, Glycine max
caccgtacgtcatgaaact

SEQ ID NO: 3144 - DNA, 19 bp, Glycine max
aattgaagggctagctcaa

SEQ ID NO: 3145 - DNA, 19 bp, Glycine max
tcctgactcgtgtaaccaa

SEQ ID NO: 3146 - DNA, 20 bp, Glycine max
gcactaatggtgacacacac

SEQ ID NO: 3147 - DNA, 22 bp, Glycine max
tcctctcttgtaataggtcgat

SEQ ID NO: 3148 - DNA, 22 bp, Glycine max
tttaaagtctcaagtcattgga

SEQ ID NO: 3149 - DNA, 25 bp, Glycine max
agctaatataacaacaaatgttcaa

SEQ ID NO: 3150 - DNA, 23 bp, Glycine max
agagtctctctctaccatgtgaa

SEQ ID NO: 3151 - DNA, 19 bp, Glycine max
tggaatgtacacaccttgg

SEQ ID NO: 3152 - DNA, 20 bp, Glycine max
tctcccaaggtgtgtacatt

SEQ ID NO: 3153 - DNA, 20 bp, Glycine max
cgttcgtacgtattatgtgg

SEQ ID NO: 3154 - DNA, 18 bp, Glycine max
tggtaacatggaggcaac

SEQ ID NO: 3155 - DNA, 20 bp, Glycine max
aaccgtttaatctttgtcca

SEQ ID NO: 3156 - DNA, 22 bp, Glycine max
tttcatttgtataatgtccttt

SEQ ID NO: 3157 - DNA, 18 bp, Glycine max
aaagccatgcacctacaa

SEQ ID NO: 3158 - DNA, 24 bp, Glycine max
tttaagtgttgaaatttccttaaa

SEQ ID NO: 3159 - DNA, 18 bp, Glycine max
tccaaatgatctccatgc

SEQ ID NO: 3160 - DNA, 24 bp, Glycine max
tttaagtgttgaaatttccttaaa

SEQ ID NO: 3161 - DNA, 18 bp, Glycine max
tccaaatgatctccatgc

SEQ ID NO: 3162 - DNA, 22 bp, Glycine max
ttgcatcacattgttaatcttt

SEQ ID NO: 3163 - DNA, 18 bp, Glycine max
ccacctacacgaatttgc

SEQ ID NO: 3164 - DNA, 18 bp, Glycine max
caaagactcctgcccttt

SEQ ID NO: 3165 - DNA, 18 bp, Glycine max
cacagtgtggtggagtga

SEQ ID NO: 3166 - DNA, 19 bp, Glycine max
acacccacgttgaaataca

SEQ ID NO: 3167 - DNA, 18 bp, Glycine max
agcctccatcaggaagat

SEQ ID NO: 3168 - DNA, 18 bp, Glycine max
cttcaaattggcgtcttt

SEQ ID NO: 3169 - DNA, 21 bp, Glycine max
ggtatgcatgcttaaacctaa

SEQ ID NO: 3170 - DNA, 23 bp, Glycine max
aatgatcaccacagtaatatcaa

SEQ ID NO: 3171 - DNA, 24 bp, Glycine max
catttctatatgagaatgatttcc

SEQ ID NO: 3172 - DNA, 24 bp, Glycine max
tgagatgaatagagaaataagaaa

SEQ ID NO: 3173 - DNA, 18 bp, Glycine max
cactccgtctgtccctta

SEQ ID NO: 3174 - DNA, 18 bp, Glycine max
ccgacatgatgacaatga

SEQ ID NO: 3175 - DNA, 18 bp, Glycine max
atctgcaacgtcctggta

SEQ ID NO: 3176 - DNA, 18 bp, Glycine max
tacgtggccacttgatct

SEQ ID NO: 3177 - DNA, 18 bp, Glycine max
cttctttgctttcccttg

SEQ ID NO: 3178 - DNA, 19 bp, Glycine max
tgctagtcacaaccctctt

SEQ ID NO: 3179 - DNA, 18 bp, Glycine max
ttcaatgcacgattggat

SEQ ID NO: 3180 - DNA, 18 bp, Glycine max
agtggtttgcatgtttgg

SEQ ID NO: 3181 - DNA, 20 bp, Glycine max
ccacttcaattaactcatgc

SEQ ID NO: 3182 - DNA, 18 bp, Glycine max
agtggtttgcatgtttgg

SEQ ID NO: 3183 - DNA, 20 bp, Glycine max
ccacttcaattaactcatgc

SEQ ID NO: 3184 - DNA, 18 bp, Glycine max
agtggtttgcatgtttgg

SEQ ID NO: 3185 - DNA, 20 bp, Glycine max
ccacttcaattaactcatgc

SEQ ID NO: 3186 - DNA, 22 bp, Glycine max
aacattaaatgatcaaaggaca

SEQ ID NO: 3187 - DNA, 18 bp, Glycine max
agctaggcccaactcttt

SEQ ID NO: 3188 - DNA, 18 bp, Glycine max
atccgatgaagaggaacc

SEQ ID NO: 3189 - DNA, 25 bp, Glycine max
tttcacactcataatcattaaactc

SEQ ID NO: 3190 - DNA, 18 bp, Glycine max
gtctccaacaccctctca

SEQ ID NO: 3191 - DNA, 22 bp, Glycine max
ctctttgtttcttcttctctcc

SEQ ID NO: 3192 - DNA, 19 bp, Glycine max
ctccggagagaagaagaaa

SEQ ID NO: 3193 - DNA, 18 bp, Glycine max
cgtcggtgataggattga

SEQ ID NO: 3194 - DNA, 18 bp, Glycine max
tgagctggctggttagtt

SEQ ID NO: 3195 - DNA, 17 bp, Glycine max
ctttcgctccctcttca

SEQ ID NO: 3196 - DNA, 21 bp, Glycine max
acacacactgaacttgttcct

SEQ ID NO: 3197 - DNA, 17 bp, Glycine max
caccgtttcaccgattt

SEQ ID NO: 3198 - DNA, 18 bp, Glycine max
ccgaatgacagagaggaa

SEQ ID NO: 3199 - DNA, 18 bp, Glycine max
caccactgaccctcaaag

SEQ ID NO: 3200 - DNA, 18 bp, Glycine max
gtggtgtgggaagttgaa

SEQ ID NO: 3201 - DNA, 20 bp, Glycine max
tcctatttgaacagggaaag

SEQ ID NO: 3202 - DNA, 18 bp, Glycine max
aatcatgggccaactaaa

SEQ ID NO: 3203 - DNA, 21 bp, Glycine max
ctggaatcaatcatcaaatgt

SEQ ID NO: 3204 - DNA, 21 bp, Glycine max
acatttgatgattgattccag

SEQ ID NO: 3205 - DNA, 18 bp, Glycine max
tccaaattagaccgagca

SEQ ID NO: 3206 - DNA, 21 bp, Glycine max
caccttcatattgctctttgt

SEQ ID NO: 3207 - DNA, 18 bp, Glycine max
tttatcttgctggcatcc

SEQ ID NO: 3208 - DNA, 18 bp, Glycine max
aatccgggaaatgattct

SEQ ID NO: 3209 - DNA, 18 bp, Glycine max
ccgtttatttgacgctgt

SEQ ID NO: 3210 - DNA, 18 bp, Glycine max
acggaacagcgtcaaata

SEQ ID NO: 3211 - DNA, 18 bp, Glycine max
ccctctcttctcccattc

SEQ ID NO: 3212 - DNA, 18 bp, Glycine max
agaattggcaaagtgcag

SEQ ID NO: 3213 - DNA, 18 bp, Glycine max
cccttcaaacaatgacga

SEQ ID NO: 3214 - DNA, 21 bp, Glycine max
tttgtcagtgtcttaccgttt

SEQ ID NO: 3215 - DNA, 18 bp, Glycine max
ctttctccctggcagact

SEQ ID NO: 3216 - DNA, 18 bp, Glycine max
acttggagtctcgctcct

SEQ ID NO: 3217 - DNA, 18 bp, Glycine max
atggcacacaagcaatct

SEQ ID NO: 3218 - DNA, 18 bp, Glycine max
gcaaggaagaggtgaaca

SEQ ID NO: 3219 - DNA, 18 bp, Glycine max
tgcacagaagggaaattg

SEQ ID NO: 3220 - DNA, 21 bp, Glycine max
cttcccaacaactctatttga

SEQ ID NO: 3221 - DNA, 23 bp, Glycine max
ttcatagagcctatgttcaattt

SEQ ID NO: 3222 - DNA, 17 bp, Glycine max
ccctaaagctggcttcg

SEQ ID NO: 3223 - DNA, 21 bp, Glycine max
ccatgtaaataacaagcaagg

SEQ ID NO: 3224 - DNA, 19 bp, Glycine max
aaagcaccaattgttaggg

SEQ ID NO: 3225 - DNA, 21 bp, Glycine max
ccatgtaaataacaagcaagg

SEQ ID NO: 3226 - DNA, 18 bp, Glycine max
tttgttcgggttcacatt

SEQ ID NO: 3227 - DNA, 18 bp, Glycine max
atcaccatgtgtgcatga

SEQ ID NO: 3228 - DNA, 18 bp, Glycine max
atgattcgggccatattt

SEQ ID NO: 3229 - DNA, 18 bp, Glycine max
aatcagaccaatggcaaa

SEQ ID NO: 3230 - DNA, 18 bp, Glycine max
ttgaagtgtcccaatggt

SEQ ID NO: 3231 - DNA, 20 bp, Glycine max
attccataacaagctaatga

SEQ ID NO: 3232 - DNA, 18 bp, Glycine max
agcgtattgcaacaaagg

SEQ ID NO: 3233 - DNA, 18 bp, Glycine max
tctatccgaggtcatcca

SEQ ID NO: 3234 - DNA, 21 bp, Glycine max
aggaaactttgagttaccaat

SEQ ID NO: 3235 - DNA, 17 bp, Glycine max
gccattctccgtttgag

SEQ ID NO: 3236 - DNA, 18 bp, Glycine max
ttgtgcgcatactttgac

SEQ ID NO: 3237 - DNA, 19 bp, Glycine max
aacggttcaaatgcataaa

SEQ ID NO: 3238 - DNA, 18 bp, Glycine max
cgcactcagatttggatt

SEQ ID NO: 3239 - DNA, 19 bp, Glycine max
agctagctatccagcccta

SEQ ID NO: 3240 - DNA, 18 bp, Glycine max
cgcactcagatttggatt

SEQ ID NO: 3241 - DNA, 19 bp, Glycine max
agctagctatccagcccta

SEQ ID NO: 3242 - DNA, 23 bp, Glycine max
caagtgaatatgttaaatttgga

SEQ ID NO: 3243 - DNA, 19 bp, Glycine max
tgagccagagtaccacaaa

SEQ ID NO: 3244 - DNA, 22 bp, Glycine max
attagtaattcagccatctaaa

SEQ ID NO: 3245 - DNA, 18 bp, Glycine max
atgcccaaatgatagcaa

SEQ ID NO: 3246 - DNA, 18 bp, Glycine max
cgcatctctaccctcaaa

SEQ ID NO: 3247 - DNA, 18 bp, Glycine max
tgcaaagaacacaacacg

SEQ ID NO: 3248 - DNA, 18 bp, Glycine max
acaggctatcatggctga

SEQ ID NO: 3249 - DNA, 18 bp, Glycine max
tgatgctgaatgcttgtg

SEQ ID NO: 3250 - DNA, 21 bp, Glycine max
aaactgggtcaacctcttaac

SEQ ID NO: 3251 - DNA, 20 bp, Glycine max
tttcaaccaacagacattga

SEQ ID NO: 3252 - DNA, 18 bp, Glycine max
catgcctgcttggtttat

SEQ ID NO: 3253 - DNA, 18 bp, Glycine max
gcaaaggttgctccttct

SEQ ID NO: 3254 - DNA, 18 bp, Glycine max
ccaaacctgggttgaact

SEQ ID NO: 3255 - DNA, 19 bp, Glycine max
cgatatcgctttggttaaa

SEQ ID NO: 3256 - DNA, 24 bp, Glycine max
aggtttaattacttatttggttca

SEQ ID NO: 3257 - DNA, 23 bp, Glycine max
tccctataatttgaaagtgatct

SEQ ID NO: 3258 - DNA, 21 bp, Glycine max
agattcacaccagacttcttt

SEQ ID NO: 3259 - DNA, 24 bp, Glycine max
gagaagaggaagtacttgtgattt

SEQ ID NO: 3260 - DNA, 18 bp, Glycine max
tggatgcacatgaaatga

SEQ ID NO: 3261 - DNA, 23 bp, Glycine max
ggattgaaatcttaaatcacttg

SEQ ID NO: 3262 - DNA, 20 bp, Glycine max
aaatttcacacacacacaca

SEQ ID NO: 3263 - DNA, 23 bp, Glycine max
ggattgaaatcttaaatcacttg

SEQ ID NO: 3264 - DNA, 18 bp, Glycine max
atgattgggaaggaaagc

SEQ ID NO: 3265 - DNA, 18 bp, Glycine max
cctccaaatcacaagctg

SEQ ID NO: 3266 - DNA, 18 bp, Glycine max
tgtggcaactacctccaa

SEQ ID NO: 3267 - DNA, 18 bp, Glycine max
aggtccgacgactaatca

SEQ ID NO: 3268 - DNA, 17 bp, Glycine max
aaaggccaacagctacg

SEQ ID NO: 3269 - DNA, 20 bp, Glycine max
agactgtgcatcttcttcgt

SEQ ID NO: 3270 - DNA, 23 bp, Glycine max
agactatgcaagaagaaagtgat

SEQ ID NO: 3271 - DNA, 19 bp, Glycine max
agactgtgcatcttcttcg

SEQ ID NO: 3272 - DNA, 18 bp, Glycine max
cagcgaagcaatccatta

SEQ ID NO: 3273 - DNA, 18 bp, Glycine max
tgcatgagtgagatttgc

SEQ ID NO: 3274 - DNA, 18 bp, Glycine max
gtgcatgataggctccaa

SEQ ID NO: 3275 - DNA, 18 bp, Glycine max
gttgttgtgcctttaggg

SEQ ID NO: 3276 - DNA, 19 bp, Glycine max
ccacaacttgattcacagg

SEQ ID NO: 3277 - DNA, 22 bp, Glycine max
ggatttatattatgggtgccta

SEQ ID NO: 3278 - DNA, 21 bp, Glycine max
ggcacccataatataaatcct

SEQ ID NO: 3279 - DNA, 18 bp, Glycine max
cgtcagttgccgtgtaat

SEQ ID NO: 3280 - DNA, 18 bp, Glycine max
atgtccagaggcagaaca

SEQ ID NO: 3281 - DNA, 19 bp, Glycine max
tcgtacgatgaccctaatg

SEQ ID NO: 3282 - DNA, 18 bp, Glycine max
tggaagagaggcaaatca

SEQ ID NO: 3283 - DNA, 18 bp, Glycine max
ccataaccaaacgaagca

SEQ ID NO: 3284 - DNA, 18 bp, Glycine max
ttgatccttgtccatcca

SEQ ID NO: 3285 - DNA, 18 bp, Glycine max
ccatcgtccaattcgtaa

SEQ ID NO: 3286 - DNA, 18 bp, Glycine max
ggcttcctttgtgaggat

SEQ ID NO: 3287 - DNA, 18 bp, Glycine max
tgagctccaggaacaaga

SEQ ID NO: 3288 - DNA, 18 bp, Glycine max
ctgatgctgcaggagatt

SEQ ID NO: 3289 - DNA, 19 bp, Glycine max
tgtgctcacatctgtgttg

SEQ ID NO: 3290 - DNA, 18 bp, Glycine max
cgaagaagaagacgacga

SEQ ID NO: 3291 - DNA, 17 bp, Glycine max
gattgctcctgcgaaac

SEQ ID NO: 3292 - DNA, 18 bp, Glycine max
cgaagaagaggaggagga

SEQ ID NO: 3293 - DNA, 18 bp, Glycine max
gacagggtttccagcttc

SEQ ID NO: 3294 - DNA, 18 bp, Glycine max
gcaacacgaagacaaagg

SEQ ID NO: 3295 - DNA, 18 bp, Glycine max
agattctgttggcggact

SEQ ID NO: 3296 - DNA, 18 bp, Glycine max
tccaaattgatgcagacc

SEQ ID NO: 3297 - DNA, 19 bp, Glycine max
cacaatcaaatcctccaaa

SEQ ID NO: 3298 - DNA, 18 bp, Glycine max
tgttgcaaatcacctgaa

SEQ ID NO: 3299 - DNA, 18 bp, Glycine max
gccaaccttacaaccaca

SEQ ID NO: 3300 - DNA, 18 bp, Glycine max
aatctccaccgagacctt

SEQ ID NO: 3301 - DNA, 17 bp, Glycine max
agtagagcacgcggaga

SEQ ID NO: 3302 - DNA, 18 bp, Glycine max
acctgatggcgctctatt

SEQ ID NO: 3303 - DNA, 18 bp, Glycine max
ctgcaggagagagaaagc

SEQ ID NO: 3304 - DNA, 19 bp, Glycine max
ctcttgtaacatgcgagga

SEQ ID NO: 3305 - DNA, 18 bp, Glycine max
gcctcccttaatttctgc

SEQ ID NO: 3306 - DNA, 23 bp, Glycine max
tttacttctatttggcaataaca

SEQ ID NO: 3307 - DNA, 18 bp, Glycine max
gtcatgacaatggccaac

SEQ ID NO: 3308 - DNA, 20 bp, Glycine max
gggattcatgcattcaatag

SEQ ID NO: 3309 - DNA, 25 bp, Glycine max
aaataaggaaatgtaacaactaaca

SEQ ID NO: 3310 - DNA, 19 bp, Glycine max
ccgcaatttgttatagtgg

SEQ ID NO: 3311 - DNA, 18 bp, Glycine max
tgcagcctccaactctac

SEQ ID NO: 3312 - DNA, 18 bp, Glycine max
tataatgcccacgatcca

SEQ ID NO: 3313 - DNA, 18 bp, Glycine max
ctttcatgctccctcaaa

SEQ ID NO: 3314 - DNA, 18 bp, Glycine max
caattgcaaaggatcgtc

SEQ ID NO: 3315 - DNA, 18 bp, Glycine max
tggcatgcaagatatcag

SEQ ID NO: 3316 - DNA, 18 bp, Glycine max
ggttgttgctgctttctc

SEQ ID NO: 3317 - DNA, 18 bp, Glycine max
gcatgaacttcggagcta

SEQ ID NO: 3318 - DNA, 19 bp, Glycine max
tcaaggaatctaagccaca

SEQ ID NO: 3319 - DNA, 19 bp, Glycine max
ttgcagtaatgttggcact

SEQ ID NO: 3320 - DNA, 18 bp, Glycine max
atctgccaatgctctcaa

SEQ ID NO: 3321 - DNA, 18 bp, Glycine max
tttctgccgaaacacttc

SEQ ID NO: 3322 - DNA, 18 bp, Glycine max
tggctcattagcatgacg

SEQ ID NO: 3323 - DNA, 19 bp, Glycine max
aacacaacgctctaaccaa

SEQ ID NO: 3324 - DNA, 18 bp, Glycine max
tagccaagcctaccttga

SEQ ID NO: 3325 - DNA, 18 bp, Glycine max
tgagttggacgaggacaa

SEQ ID NO: 3326 - DNA, 22 bp, Glycine max
gagtaattcgatatgcttgaga

SEQ ID NO: 3327 - DNA, 18 bp, Glycine max
taatctcccggactgaaa

SEQ ID NO: 3328 - DNA, 22 bp, Glycine max
gagtaattcgatatgcttgaga

SEQ ID NO: 3329 - DNA, 18 bp, Glycine max
taatctcccggactgaaa

SEQ ID NO: 3330 - DNA, 19 bp, Glycine max
aaagtccgggtgattagag

SEQ ID NO: 3331 - DNA, 19 bp, Glycine max
tctgaatctgattgcctga

SEQ ID NO: 3332 - DNA, 21 bp, Glycine max
tgaaatccaagtgaaagattg

SEQ ID NO: 3333 - DNA, 18 bp, Glycine max
aacgtccatggattgaga

SEQ ID NO: 3334 - DNA, 21 bp, Glycine max
tgaaatccaagtgaaagattg

SEQ ID NO: 3335 - DNA, 18 bp, Glycine max
aacgtccatggattgaga

SEQ ID NO: 3336 - DNA, 18 bp, Glycine max
tctactgctcccaatcca

SEQ ID NO: 3337 - DNA, 18 bp, Glycine max
gcgcgtggataataattg

SEQ ID NO: 3338 - DNA, 18 bp, Glycine max
cctctgagtagggcatca

SEQ ID NO: 3339 - DNA, 19 bp, Glycine max
tggtattgcttgctactcg

SEQ ID NO: 3340 - DNA, 20 bp, Glycine max
cacccatataaacttgtcca

SEQ ID NO: 3341 - DNA, 18 bp, Glycine max
ttcgcttccatcaacatc

SEQ ID NO: 3342 - DNA, 18 bp, Glycine max
gcaaataagggtgctcaa

SEQ ID NO: 3343 - DNA, 19 bp, Glycine max
tcatggacatttaggtgct

SEQ ID NO: 3344 - DNA, 18 bp, Glycine max
tttgccttaattggttgc

SEQ ID NO: 3345 - DNA, 20 bp, Glycine max
gggcaattatttgctttatt

SEQ ID NO: 3346 - DNA, 18 bp, Glycine max
cgttctcccttcatcctt

SEQ ID NO: 3347 - DNA, 19 bp, Glycine max
gcacagcttgcaactctta

SEQ ID NO: 3348 - DNA, 18 bp, Glycine max
ggccatgaatgaaactca

SEQ ID NO: 3349 - DNA, 16 bp, Glycine max
agcagctgggctcaat

SEQ ID NO: 3350 - DNA, 18 bp, Glycine max
tcggctaggtttcctaca

SEQ ID NO: 3351 - DNA, 25 bp, Glycine max
tgattattctaatgaaatgataacg

SEQ ID NO: 3352 - DNA, 18 bp, Glycine max
tgagtgacccagtgtgtg

SEQ ID NO: 3353 - DNA, 25 bp, Glycine max
ccatgatatgatgtaatatttctgt

SEQ ID NO: 3354 - DNA, 18 bp, Glycine max
tggatccaaccgactaga

SEQ ID NO: 3355 - DNA, 20 bp, Glycine max
tgacactttgtgaatgaagg

SEQ ID NO: 3356 - DNA, 18 bp, Glycine max
tggatccaaccgactaga

SEQ ID NO: 3357 - DNA, 20 bp, Glycine max
tgacactttgtgaatgaagg

SEQ ID NO: 3358 - DNA, 19 bp, Glycine max
caagaagttcaccaaacga

SEQ ID NO: 3359 - DNA, 19 bp, Glycine max
gactcgggtctttaatgga

SEQ ID NO: 3360 - DNA, 18 bp, Glycine max
atagcgcgtgactactcg

SEQ ID NO: 3361 - DNA, 21 bp, Glycine max
aaataaagaaatcgagtgaaa

SEQ ID NO: 3362 - DNA, 18 bp, Glycine max
agcagcaacacgtctcat

SEQ ID NO: 3363 - DNA, 18 bp, Glycine max
ttggctgcattcattctt

SEQ ID NO: 3364 - DNA, 18 bp, Glycine max
tcgcggaatactcaattc

SEQ ID NO: 3365 - DNA, 18 bp, Glycine max
atttgcaactccacttcg

SEQ ID NO: 3366 - DNA, 22 bp, Glycine max
aagtgcatcatttaacttctca

SEQ ID NO: 3367 - DNA, 19 bp, Glycine max
tcctgtacgtagcgtttga

SEQ ID NO: 3368 - DNA, 19 bp, Glycine max
tttcaaacaaagcaatcca

SEQ ID NO: 3369 - DNA, 18 bp, Glycine max
actccctgtttcctctgg

SEQ ID NO: 3370 - DNA, 18 bp, Glycine max
ccagaggaaacagggagt

SEQ ID NO: 3371 - DNA, 17 bp, Glycine max
atcctccgtcgtttgtg

SEQ ID NO: 3372 - DNA, 18 bp, Glycine max
ccttatcccacgacacaa

SEQ ID NO: 3373 - DNA, 18 bp, Glycine max
aagctctggctttggaat

SEQ ID NO: 3374 - DNA, 19 bp, Glycine max
ggaaacaagcactctctcc

SEQ ID NO: 3375 - DNA, 22 bp, Glycine max
gacactagagcactagcacaaa

SEQ ID NO: 3376 - DNA, 17 bp, Glycine max
atctgtccagccaccaa

SEQ ID NO: 3377 - DNA, 17 bp, Glycine max
attggtatgcccgtgct

SEQ ID NO: 3378 - DNA, 18 bp, Glycine max
tttacactgccggatcac

SEQ ID NO: 3379 - DNA, 19 bp, Glycine max
ccattggaaatcatcaaca

SEQ ID NO: 3380 - DNA, 21 bp, Glycine max
tggtaaagacatgaaatcaaa

SEQ ID NO: 3381 - DNA, 18 bp, Glycine max
tcggttaggatgaacacg

SEQ ID NO: 3382 - DNA, 18 bp, Glycine max
cctctttcaattcgcaca

SEQ ID NO: 3383 - DNA, 18 bp, Glycine max
ggctagcttcaattcgtg

SEQ ID NO: 3384 - DNA, 19 bp, Glycine max
ttgcttgcattctatgtcc

SEQ ID NO: 3385 - DNA, 19 bp, Glycine max
cacatccaagacgtgaaac

SEQ ID NO: 3386 - DNA, 20 bp, Glycine max
tttgcctacactaccacttt

SEQ ID NO: 3387 - DNA, 18 bp, Glycine max
aattgacgatccaacacg

SEQ ID NO: 3388 - DNA, 22 bp, Glycine max
aattccttatcaattcatcaca

SEQ ID NO: 3389 - DNA, 18 bp, Glycine max
ccagaaagggtttccatt

SEQ ID NO: 3390 - DNA, 19 bp, Glycine max
ccctaataatggtggaagc

SEQ ID NO: 3391 - DNA, 18 bp, Glycine max
aggaacccaaacccaata

SEQ ID NO: 3392 - DNA, 18 bp, Glycine max
aaattacaagctgccaaa

SEQ ID NO: 3393 - DNA, 20 bp, Glycine max
accgtagggtgtacttctca

SEQ ID NO: 3394 - DNA, 19 bp, Glycine max
tcggatgttaaatgattgg

SEQ ID NO: 3395 - DNA, 18 bp, Glycine max
ttggactggttctggaaa

SEQ ID NO: 3396 - DNA, 17 bp, Glycine max
gccggaaattctctcct

SEQ ID NO: 3397 - DNA, 18 bp, Glycine max
attaagctcgccatcctc

SEQ ID NO: 3398 - DNA, 21 bp, Glycine max
tcccaatatcctaggtagagc

SEQ ID NO: 3399 - DNA, 18 bp, Glycine max
aacccaactgaacggttt

SEQ ID NO: 3400 - DNA, 21 bp, Glycine max
agaatttgaacatgaaactcc

SEQ ID NO: 3401 - DNA, 18 bp, Glycine max
tgcccaattaacatgaca

SEQ ID NO: 3402 - DNA, 18 bp, Glycine max
accttgtgtgttcgcttt

SEQ ID NO: 3403 - DNA, 18 bp, Glycine max
tggagagggtgtttggta

SEQ ID NO: 3404 - DNA, 18 bp, Glycine max
cccatacccgttcgttat

SEQ ID NO: 3405 - DNA, 21 bp, Glycine max
tcaatctcatcttcatcgaat

SEQ ID NO: 3406 - DNA, 18 bp, Glycine max
tgcaactgaaccaaatga

SEQ ID NO: 3407 - DNA, 18 bp, Glycine max
tggaacagcagactggtt

SEQ ID NO: 3408 - DNA, 17 bp, Glycine max
gaatgccggaattgtgt

SEQ ID NO: 3409 - DNA, 17 bp, Glycine max
agccattcaccatccat

SEQ ID NO: 3410 - DNA, 18 bp, Glycine max
tttgttgggagacactgc

SEQ ID NO: 3411 - DNA, 18 bp, Glycine max
ggcgacccactagacttt

SEQ ID NO: 3412 - DNA, 18 bp, Glycine max
gttccctcatccctgttt

SEQ ID NO: 3413 - DNA, 18 bp, Glycine max
tgaatttcgcaaaggaaa

SEQ ID NO: 3414 - DNA, 18 bp, Glycine max
gccaaacactcaagcaaa

SEQ ID NO: 3415 - DNA, 21 bp, Glycine max
tgacactaagaatttgggtta

SEQ ID NO: 3416 - DNA, 18 bp, Glycine max
ccgagggttaatctcaca

SEQ ID NO: 3417 - DNA, 18 bp, Glycine max
ggagtgtgtacgcacgat

SEQ ID NO: 3418 - DNA, 20 bp, Glycine max
caaagttcatgcatgcttat

SEQ ID NO: 3419 - DNA, 21 bp, Glycine max
cactcacgatgagaagtgatt

SEQ ID NO: 3420 - DNA, 18 bp, Glycine max
ctgcatgtgacaaagcaa

SEQ ID NO: 3421 - DNA, 18 bp, Glycine max
tccgggaagtactcagtg

SEQ ID NO: 3422 - DNA, 19 bp, Glycine max
accttcagcatgccttatt

SEQ ID NO: 3423 - DNA, 19 bp, Glycine max
aaccttcgccttaaacatt

SEQ ID NO: 3424 - DNA, 19 bp, Glycine max
accttcagcatgccttatt

SEQ ID NO: 3425 - DNA, 19 bp, Glycine max
aaccttcgccttaaacatt

SEQ ID NO: 3426 - DNA, 20 bp, Glycine max
aaatcaaggagaaatgcaaa

SEQ ID NO: 3427 - DNA, 18 bp, Glycine max
cccaatgcaacaactttc

SEQ ID NO: 3428 - DNA, 20 bp, Glycine max
acgagctaagacgttaatgg

SEQ ID NO: 3429 - DNA, 19 bp, Glycine max
aaattggtcacggttcatt

SEQ ID NO: 3430 - DNA, 18 bp, Glycine max
gcaaactgaagcagagga

SEQ ID NO: 3431 - DNA, 19 bp, Glycine max
tgaaacaattccactttgg

SEQ ID NO: 3432 - DNA, 20 bp, Glycine max
caattccattccatcaattt

SEQ ID NO: 3433 - DNA, 20 bp, Glycine max
acaactcaagttaaccatcg

SEQ ID NO: 3434 - DNA, 19 bp, Glycine max
tgagaatgcaatttggtgt

SEQ ID NO: 3435 - DNA, 20 bp, Glycine max
accctagaggagatgagaaa

SEQ ID NO: 3436 - DNA, 19 bp, Glycine max
gccttcatttgttgcataa

SEQ ID NO: 3437 - DNA, 18 bp, Glycine max
gagcccttcctgttacct

SEQ ID NO: 3438 - DNA, 16 bp, Glycine max
atgcacacccaatcca

SEQ ID NO: 3439 - DNA, 18 bp, Glycine max
aatccaatcacgcactgt

SEQ ID NO: 3440 - DNA, 18 bp, Glycine max
tggccttgcaagattaaa

SEQ ID NO: 3441 - DNA, 21 bp, Glycine max
tgttaatcgacaaggattgtt

SEQ ID NO: 3442 - DNA, 18 bp, Glycine max
gacacgggactccttctt

SEQ ID NO: 3443 - DNA, 17 bp, Glycine max
agcggcacacaaagatt

SEQ ID NO: 3444 - DNA, 19 bp, Glycine max
agcttcaatctttgtgtgc

SEQ ID NO: 3445 - DNA, 19 bp, Glycine max
ttctcttaggatggcatgt

SEQ ID NO: 3446 - DNA, 18 bp, Glycine max
ccaattctccaccctctc

SEQ ID NO: 3447 - DNA, 19 bp, Glycine max
ggcatctttgatttccaat

SEQ ID NO: 3448 - DNA, 19 bp, Glycine max
tggaaatcaaagatgccta

SEQ ID NO: 3449 - DNA, 18 bp, Glycine max
atatctgtggtgcggaag

SEQ ID NO: 3450 - DNA, 20 bp, Glycine max
cttccatttcaatttcttgg

SEQ ID NO: 3451 - DNA, 20 bp, Glycine max
tgcattgttgattcatgttt

SEQ ID NO: 3452 - DNA, 20 bp, Glycine max
aaggtaaacaacccagacaa

SEQ ID NO: 3453 - DNA, 18 bp, Glycine max
gtactgttgggccactca

SEQ ID NO: 3454 - DNA, 18 bp, Glycine max
tttgttgggagacactgc

SEQ ID NO: 3455 - DNA, 18 bp, Glycine max
ggcgacccactagacttt

SEQ ID NO: 3456 - DNA, 21 bp, Glycine max
tggtacagtagttcatcagca

SEQ ID NO: 3457 - DNA, 19 bp, Glycine max
tgcacagtaaccacaaaca

SEQ ID NO: 3458 - DNA, 17 bp, Glycine max
actcctcctctcgttcg

SEQ ID NO: 3459 - DNA, 18 bp, Glycine max
tacgccgatatcagttgc

SEQ ID NO: 3460 - DNA, 22 bp, Glycine max
tggtacagtagttcatcacctt

SEQ ID NO: 3461 - DNA, 18 bp, Glycine max
tccaataaagagccgaaa

SEQ ID NO: 3462 - DNA, 18 bp, Glycine max
atggcatccgtctttaca

SEQ ID NO: 3463 - DNA, 18 bp, Glycine max
aagtaaagtgcgcgtagc

SEQ ID NO: 3464 - DNA, 18 bp, Glycine max
tcgcacggatagtgattt

SEQ ID NO: 3465 - DNA, 22 bp, Glycine max
tgcttgagttatttgagaatga

SEQ ID NO: 3466 - DNA, 18 bp, Glycine max
caaattcaccgccaatta

SEQ ID NO: 3467 - DNA, 17 bp, Glycine max
atccctcttccgtcctc

SEQ ID NO: 3468 - DNA, 18 bp, Glycine max
gaaacccagtgagcaaga

SEQ ID NO: 3469 - DNA, 19 bp, Glycine max
cccaactaaaccaaccttt

SEQ ID NO: 3470 - DNA, 18 bp, Glycine max
ggtgcattgcataggaag

SEQ ID NO: 3471 - DNA, 20 bp, Glycine max
caccaaattgacactcttca

SEQ ID NO: 3472 - DNA, 19 bp, Glycine max
cgtcaagcattgctatctg

SEQ ID NO: 3473 - DNA, 18 bp, Glycine max
gccacaacaagagcaaac

SEQ ID NO: 3474 - DNA, 18 bp, Glycine max
cacgcctctatccctcta

SEQ ID NO: 3475 - DNA, 19 bp, Glycine max
ggttcgtcgtaattgggta

SEQ ID NO: 3476 - DNA, 17 bp, Glycine max
gaatgccggaattgtgt

SEQ ID NO: 3477 - DNA, 17 bp, Glycine max
agccattcaccatccat

SEQ ID NO: 3478 - DNA, 25 bp, Glycine max
tgatacatagagatattcgagactt

SEQ ID NO: 3479 - DNA, 18 bp, Glycine max
accaaatcatgcaggtca

SEQ ID NO: 3480 - DNA, 18 bp, Glycine max
gaccgtgtctctgcattc

SEQ ID NO: 3481 - DNA, 21 bp, Glycine max
ttcttcatccaaacacattct

SEQ ID NO: 3482 - DNA, 18 bp, Glycine max
catgatttggtggctctt

SEQ ID NO: 3483 - DNA, 18 bp, Glycine max
ttcctagtccgtctgcac

SEQ ID NO: 3484 - DNA, 18 bp, Glycine max
tcaggttgaactgcgaac

SEQ ID NO: 3485 - DNA, 18 bp, Glycine max
aaacctgcttccgttaca

SEQ ID NO: 3486 - DNA, 21 bp, Glycine max
tcttctatgattaacgggttg

SEQ ID NO: 3487 - DNA, 19 bp, Glycine max
gcagaagtgcagaacattg

SEQ ID NO: 3488 - DNA, 20 bp, Glycine max
ttgagtgacacaaagcataa

SEQ ID NO: 3489 - DNA, 18 bp, Glycine max
tgcagtggcaacagaata

SEQ ID NO: 3490 - DNA, 20 bp, Glycine max
cttccatttcaatttcttgg

SEQ ID NO: 3491 - DNA, 20 bp, Glycine max
tgcattgttgattcatgttt

SEQ ID NO: 3492 - DNA, 18 bp, Glycine max
accgatgccaagtgtaac

SEQ ID NO: 3493 - DNA, 18 bp, Glycine max
tctccggttccatgaata

SEQ ID NO: 3494 - DNA, 19 bp, Glycine max
tgtctaaccagcactggaa

SEQ ID NO: 3495 - DNA, 20 bp, Glycine max
aactttctccaatcaaccaa

SEQ ID NO: 3496 - DNA, 18 bp, Glycine max
ccaaatccatgaggagaa

SEQ ID NO: 3497 - DNA, 18 bp, Glycine max
tgggctggaaagtaattc

SEQ ID NO: 3498 - DNA, 20 bp, Glycine max
gcatgatttcttccatcttc

SEQ ID NO: 3499 - DNA, 21 bp, Glycine max
aaagtgatttggttgaagaga

SEQ ID NO: 3500 - DNA, 25 bp, Glycine max
aagtttaatgataagacatcttgaa

SEQ ID NO: 3501 - DNA, 18 bp, Glycine max
ttggcacagctcaaggta

SEQ ID NO: 3502 - DNA, 18 bp, Glycine max
tgaaaggatttggtgcat

SEQ ID NO: 3503 - DNA, 18 bp, Glycine max
tcgagcaaaggagtagca

SEQ ID NO: 3504 - DNA, 19 bp, Glycine max
aaacgcaatttcatgtgac

SEQ ID NO: 3505 - DNA, 18 bp, Glycine max
attcctctgcctgtctcc

SEQ ID NO: 3506 - DNA, 20 bp, Glycine max
ctgaaatattgaaacgctca

SEQ ID NO: 3507 - DNA, 20 bp, Glycine max
caagcaagttattccctctg

SEQ ID NO: 3508 - DNA, 20 bp, Glycine max
ctgaaatattgaaacgctca

SEQ ID NO: 3509 - DNA, 20 bp, Glycine max
caagcaagttattccctctg

SEQ ID NO: 3510 - DNA, 18 bp, Glycine max
gggtatcacagccattga

SEQ ID NO: 3511 - DNA, 18 bp, Glycine max
gccctaactccatcttgg

SEQ ID NO: 3512 - DNA, 24 bp, Glycine max
catgtaagtttattctagtggtca

SEQ ID NO: 3513 - DNA, 18 bp, Glycine max
tccaccagctctacctga

SEQ ID NO: 3514 - DNA, 21 bp, Glycine max
cggactttaaggactaaggag

SEQ ID NO: 3515 - DNA, 16 bp, Glycine max
ggtggcttggccataa

SEQ ID NO: 3516 - DNA, 18 bp, Glycine max
agggtttgaggcacattt

SEQ ID NO: 3517 - DNA, 18 bp, Glycine max
ggaaaggagaagcaccat

SEQ ID NO: 3518 - DNA, 18 bp, Glycine max
ggcgacccactagacttt

SEQ ID NO: 3519 - DNA, 18 bp, Glycine max
tttgttgggagacactgc

SEQ ID NO: 3520 - DNA, 16 bp, Glycine max
gggaaggtgggtgaaa

SEQ ID NO: 3521 - DNA, 18 bp, Glycine max
tgtgcacgttgaattgtt

SEQ ID NO: 3522 - DNA, 19 bp, Glycine max
ccttgattcaaaggagagc

SEQ ID NO: 3523 - DNA, 19 bp, Glycine max
aaccaaatgagatggcttt

SEQ ID NO: 3524 - DNA, 18 bp, Glycine max
gggaaggaccatttagcc

SEQ ID NO: 3525 - DNA, 18 bp, Glycine max
cgcaacgtgctctgtact

SEQ ID NO: 3526 - DNA, 19 bp, Glycine max
ccaaggttagagtgcatca

SEQ ID NO: 3527 - DNA, 18 bp, Glycine max
gctgccatcatcttcaac

SEQ ID NO: 3528 - DNA, 18 bp, Glycine max
gagcaatccaacctttca

SEQ ID NO: 3529 - DNA, 18 bp, Glycine max
tagcaggcacactccatt

SEQ ID NO: 3530 - DNA, 18 bp, Glycine max
ccgtgcgtggttagtagt

SEQ ID NO: 3531 - DNA, 18 bp, Glycine max
tgtttcgagttcgactgc

SEQ ID NO: 3532 - DNA, 22 bp, Glycine max
ggatacttcaaagttcaaaggt

SEQ ID NO: 3533 - DNA, 18 bp, Glycine max
tgtttcgagttcgactgc

SEQ ID NO: 3534 - DNA, 18 bp, Glycine max
tcctcaaattgtcctcca

SEQ ID NO: 3535 - DNA, 18 bp, Glycine max
gcatggctacccaacata

SEQ ID NO: 3536 - DNA, 18 bp, Glycine max
tgccgatattggaatttg

SEQ ID NO: 3537 - DNA, 20 bp, Glycine max
acagagctggttgctctatt

SEQ ID NO: 3538 - DNA, 20 bp, Glycine max
tcaaggagtctagttgctca

SEQ ID NO: 3539 - DNA, 18 bp, Glycine max
catggaattccttcacca

SEQ ID NO: 3540 - DNA, 22 bp, Glycine max
ttgacaacatacataccgaagt

SEQ ID NO: 3541 - DNA, 19 bp, Glycine max
tttgcaaatgctaatcaac

SEQ ID NO: 3542 - DNA, 18 bp, Glycine max
atctgttgcgaaagatcg

SEQ ID NO: 3543 - DNA, 20 bp, Glycine max
aaagctttatacgagcgaga

SEQ ID NO: 3544 - DNA, 22 bp, Glycine max
caagaccaaagaatacatagca

SEQ ID NO: 3545 - DNA, 20 bp, Glycine max
acacattctcttgcacgtaa

SEQ ID NO: 3546 - DNA, 18 bp, Glycine max
ccgacacgattgttaggt

SEQ ID NO: 3547 - DNA, 18 bp, Glycine max
ctgaaagttgcaagcaca

SEQ ID NO: 3548 - DNA, 18 bp, Glycine max
tccgtagtgggtgacaag

SEQ ID NO: 3549 - DNA, 23 bp, Glycine max
aaagacaattcactaaattcgat

SEQ ID NO: 3550 - DNA, 19 bp, Glycine max
aattgtttgcggagctagt

SEQ ID NO: 3551 - DNA, 23 bp, Glycine max
aaagacaattcactaaattcgat

SEQ ID NO: 3552 - DNA, 22 bp, Glycine max
acaaagagaggattacatcaca

SEQ ID NO: 3553 - DNA, 19 bp, Glycine max
catgacctagcttcaacca

SEQ ID NO: 3554 - DNA, 21 bp, Glycine max
aattaagtgaccgagatttga

SEQ ID NO: 3555 - DNA, 18 bp, Glycine max
gggacatttagccttcct

SEQ ID NO: 3556 - DNA, 23 bp, Glycine max
ttcctttcatatcaaacaacttt

SEQ ID NO: 3557 - DNA, 18 bp, Glycine max
gggtaccattgattcacg

SEQ ID NO: 3558 - DNA, 19 bp, Glycine max
tttgaagcagtgacgtgtt

SEQ ID NO: 3559 - DNA, 18 bp, Glycine max
acagatgggtgtgaaacg

SEQ ID NO: 3560 - DNA, 19 bp, Glycine max
tctcctagttgcgatacca

SEQ ID NO: 3561 - DNA, 16 bp, Glycine max
acatggatgggcgaaa

SEQ ID NO: 3562 - DNA, 20 bp, Glycine max
aagttgagttgcttgtgtca

SEQ ID NO: 3563 - DNA, 18 bp, Glycine max
tttcaatgcacctctggt

SEQ ID NO: 3564 - DNA, 22 bp, Glycine max
tcctagcgacttacaaatatca

SEQ ID NO: 3565 - DNA, 18 bp, Glycine max
catgggaaacgagaaaga

SEQ ID NO: 3566 - DNA, 18 bp, Glycine max
ttgccctacatttggcta

SEQ ID NO: 3567 - DNA, 24 bp, Glycine max
tcattaaatagggtcttagttgag

SEQ ID NO: 3568 - DNA, 20 bp, Glycine max
tggtagggagatgctacttg

SEQ ID NO: 3569 - DNA, 18 bp, Glycine max
caccacacgtatgcagaa

SEQ ID NO: 3570 - DNA, 18 bp, Glycine max
ggttcgttgctcagaagt

SEQ ID NO: 3571 - DNA, 22 bp, Glycine max
tttaaggatgaattgaaacaaa

SEQ ID NO: 3572 - DNA, 23 bp, Glycine max
aaattactaaatgattgggattt

SEQ ID NO: 3573 - DNA, 21 bp, Glycine max
tgccttgtttaattgatcttt

SEQ ID NO: 3574 - DNA, 19 bp, Glycine max
acattctgatggaaggatt

SEQ ID NO: 3575 - DNA, 22 bp, Glycine max
ttgtgatgtgctgtaatatgaa

SEQ ID NO: 3576 - DNA, 20 bp, Glycine max
gtgcatcaccattaaactca

SEQ ID NO: 3577 - DNA, 20 bp, Glycine max
aaacacataaacaaccacac

SEQ ID NO: 3578 - DNA, 18 bp, Glycine max
caagccaacgtcatcttc

SEQ ID NO: 3579 - DNA, 19 bp, Glycine max
ttcaaagcttcggactaca

SEQ ID NO: 3580 - DNA, 19 bp, Glycine max
tgcaagctgcagttagatt

SEQ ID NO: 3581 - DNA, 18 bp, Glycine max
agcctcccatgatttctc

SEQ ID NO: 3582 - DNA, 18 bp, Glycine max
tgcgattcggattaattt

SEQ ID NO: 3583 - DNA, 18 bp, Glycine max
aaacaagaggcatgcaaa

SEQ ID NO: 3584 - DNA, 21 bp, Glycine max
cagctcgaactcttgtaattt

SEQ ID NO: 3585 - DNA, 19 bp, Glycine max
tctcgctgacttaatgctt

SEQ ID NO: 3586 - DNA, 19 bp, Glycine max
agcaatgcaagaaatgaaa

SEQ ID NO: 3587 - DNA, 18 bp, Glycine max
ttcctccaaattgcttca

SEQ ID NO: 3588 - DNA, 18 bp, Glycine max
atgttcggctctcctacc

SEQ ID NO: 3589 - DNA, 20 bp, Glycine max
tcattgttgacgtgaaatct

SEQ ID NO: 3590 - DNA, 23 bp, Glycine max
agggtctctttgaataagtttct

SEQ ID NO: 3591 - DNA, 18 bp, Glycine max
cctgtgaccaatcagcat

SEQ ID NO: 3592 - DNA, 20 bp, Glycine max
tgaaattcaatacatgagca

SEQ ID NO: 3593 - DNA, 19 bp, Glycine max
ttgaaagcttgatggaatg

SEQ ID NO: 3594 - DNA, 19 bp, Glycine max
tctgtttggattgatggaa

SEQ ID NO: 3595 - DNA, 18 bp, Glycine max
tgtgccatcctctctcat

SEQ ID NO: 3596 - DNA, 19 bp, Glycine max
tcaggcagccatgataata

SEQ ID NO: 3597 - DNA, 18 bp, Glycine max
atttggttccatcgtttg

SEQ ID NO: 3598 - DNA, 18 bp, Glycine max
caaacgatggaaccaaat

SEQ ID NO: 3599 - DNA, 18 bp, Glycine max
tagagcagaacggattgg

SEQ ID NO: 3600 - DNA, 18 bp, Glycine max
gcgagatctgaatggaaa

SEQ ID NO: 3601 - DNA, 18 bp, Glycine max
gtaacgtcctcgacaagc

SEQ ID NO: 3602 - DNA, 18 bp, Glycine max
acggtgaattggctacct

SEQ ID NO: 3603 - DNA, 22 bp, Glycine max
aatttgttaagggtacatgaaa

SEQ ID NO: 3604 - DNA, 18 bp, Glycine max
tgcagaggtggtattggt

SEQ ID NO: 3605 - DNA, 18 bp, Glycine max
caccgtcaccaatgtctt

SEQ ID NO: 3606 - DNA, 21 bp, Glycine max
aaattgtttatgacatggaaa

SEQ ID NO: 3607 - DNA, 19 bp, Glycine max
cgtgaaatgattcctcgat

SEQ ID NO: 3608 - DNA, 19 bp, Glycine max
ttattcctttgcccaattt

SEQ ID NO: 3609 - DNA, 24 bp, Glycine max
tcactaatcacaattaaacaacct

SEQ ID NO: 3610 - DNA, 18 bp, Glycine max
tcacagtcccgagtccta

SEQ ID NO: 3611 - DNA, 18 bp, Glycine max
ggatcggttgtgatctga

SEQ ID NO: 3612 - DNA, 18 bp, Glycine max
ccaccattcaccactttc

SEQ ID NO: 3613 - DNA, 18 bp, Glycine max
aagcagtttcagcaaacg

SEQ ID NO: 3614 - DNA, 22 bp, Glycine max
aatgatttcaatgttaatacga

SEQ ID NO: 3615 - DNA, 23 bp, Glycine max
tttgtttgaactcaactaatatc

SEQ ID NO: 3616 - DNA, 23 bp, Glycine max
agatgatatgcaatttcagagtt

SEQ ID NO: 3617 - DNA, 18 bp, Glycine max
ttggcgaagagtgttgtt

SEQ ID NO: 3618 - DNA, 19 bp, Glycine max
tgcctagttaacggtttga

SEQ ID NO: 3619 - DNA, 18 bp, Glycine max
ttcattcatcctcccaaa

SEQ ID NO: 3620 - DNA, 18 bp, Glycine max
agcttggattgagtaccg

SEQ ID NO: 3621 - DNA, 18 bp, Glycine max
tgtttgttgctttgttgg

SEQ ID NO: 3622 - DNA, 21 bp, Glycine max
aaactttaggattaattcacg

SEQ ID NO: 3623 - DNA, 20 bp, Glycine max
caactaaggtgaatgggtga

SEQ ID NO: 3624 - DNA, 18 bp, Glycine max
atgcttgcaatgctcttt

SEQ ID NO: 3625 - DNA, 22 bp, Glycine max
cgtgtatttgtaaatgtgatcc

SEQ ID NO: 3626 - DNA, 18 bp, Glycine max
aaggaagaccacgtgaaa

SEQ ID NO: 3627 - DNA, 18 bp, Glycine max
gtggtggaggcagatgta

SEQ ID NO: 3628 - DNA, 18 bp, Glycine max
gcggattccgtaaacata

SEQ ID NO: 3629 - DNA, 18 bp, Glycine max
gtcccagataccgctcat

SEQ ID NO: 3630 - DNA, 22 bp, Glycine max
aatgatgcataaagtcatgttt

SEQ ID NO: 3631 - DNA, 21 bp, Glycine max
cctttcaataaatgtcctcaa

SEQ ID NO: 3632 - DNA, 23 bp, Glycine max
tgaattcaaatgaacttaaacaa

SEQ ID NO: 3633 - DNA, 19 bp, Glycine max
acccgtgtgatgtatgaaa

SEQ ID NO: 3634 - DNA, 20 bp, Glycine max
tgtaaatgccttaccaaaca

SEQ ID NO: 3635 - DNA, 18 bp, Glycine max
ggtgagccattggatatg

SEQ ID NO: 3636 - DNA, 18 bp, Glycine max
tcagaaggcacgaagaag

SEQ ID NO: 3637 - DNA, 18 bp, Glycine max
atcgggtgtgagcataga

SEQ ID NO: 3638 - DNA, 18 bp, Glycine max
agaaccgtcaagggacac

SEQ ID NO: 3639 - DNA, 18 bp, Glycine max
cagtttcaaatgggttgc

SEQ ID NO: 3640 - DNA, 18 bp, Glycine max
aggaggtagatgctgtcg

SEQ ID NO: 3641 - DNA, 18 bp, Glycine max
ttgcattctccctcttca

SEQ ID NO: 3642 - DNA, 18 bp, Glycine max
tggctcacaacaaccttt

SEQ ID NO: 3643 - DNA, 19 bp, Glycine max
cggtggaggaaacattagt

SEQ ID NO: 3644 - DNA, 19 bp, Glycine max
caggaacatgtgactttgc

SEQ ID NO: 3645 - DNA, 18 bp, Glycine max
cttaatttcgcaccgaca

SEQ ID NO: 3646 - DNA, 20 bp, Glycine max
ggttggatttcaactctttg

SEQ ID NO: 3647 - DNA, 18 bp, Glycine max
tctctccctcccttgttc

SEQ ID NO: 3648 - DNA, 18 bp, Glycine max
gggtgcattagttgctca

SEQ ID NO: 3649 - DNA, 18 bp, Glycine max
tgatgttgtgtggaagca

SEQ ID NO: 3650 - DNA, 22 bp, Glycine max
ggattctcatgatctcctaatg

SEQ ID NO: 3651 - DNA, 18 bp, Glycine max
gagaagccaaagcacaaa

SEQ ID NO: 3652 - DNA, 23 bp, Glycine max
aaatgcttaaactttagtcccta

SEQ ID NO: 3653 - DNA, 18 bp, Glycine max
ggcccgtttgttagaact

SEQ ID NO: 3654 - DNA, 18 bp, Glycine max
cctgcgtgaccatgaata

SEQ ID NO: 3655 - DNA, 18 bp, Glycine max
tttctggtcacatgcaca

SEQ ID NO: 3656 - DNA, 18 bp, Glycine max
cgcaatcaaagacctgtt

SEQ ID NO: 3657 - DNA, 17 bp, Glycine max
tagcgcgctctctctct

SEQ ID NO: 3658 - DNA, 18 bp, Glycine max
cgcaatcaaagacctgtt

SEQ ID NO: 3659 - DNA, 18 bp, Glycine max
tgccttggctatttcctt

SEQ ID NO: 3660 - DNA, 18 bp, Glycine max
gcccaggaggaactttat

SEQ ID NO: 3661 - DNA, 21 bp, Glycine max
caagctacagcatttctcttt

SEQ ID NO: 3662 - DNA, 18 bp, Glycine max
gctctatgcgatctcacg

SEQ ID NO: 3663 - DNA, 18 bp, Glycine max
agaggtcacgcagatgaa

SEQ ID NO: 3664 - DNA, 18 bp, Glycine max
taagtcccgtttgggttt

SEQ ID NO: 3665 - DNA, 18 bp, Glycine max
ttatcgccaacaatacca

SEQ ID NO: 3666 - DNA, 20 bp, Glycine max
accttcgaagatcaattcaa

SEQ ID NO: 3667 - DNA, 18 bp, Glycine max
acattgcggaagaaatga

SEQ ID NO: 3668 - DNA, 18 bp, Glycine max
tcggcttaattctgagca

SEQ ID NO: 3669 - DNA, 20 bp, Glycine max
ttcatgatttcacattggtt

SEQ ID NO: 3670 - DNA, 18 bp, Glycine max
ctttagctccagcccatt

SEQ ID NO: 3671 - DNA, 19 bp, Glycine max
tgtaacgatcctgaactgc

SEQ ID NO: 3672 - DNA, 17 bp, Glycine max
ctcttggagccgtgttc

SEQ ID NO: 3673 - DNA, 18 bp, Glycine max
tgcctgaatagcatgaaa

SEQ ID NO: 3674 - DNA, 24 bp, Glycine max
tctaattcaaatgagattgacttt

SEQ ID NO: 3675 - DNA, 18 bp, Glycine max
caacagctcacacacgaa

SEQ ID NO: 3676 - DNA, 18 bp, Glycine max
ctccattggtatggttgg

SEQ ID NO: 3677 - DNA, 18 bp, Glycine max
gagagaggcaaggaaagc

SEQ ID NO: 3678 - DNA, 18 bp, Glycine max
agcaagtttgaagcaacg

SEQ ID NO: 3679 - DNA, 21 bp, Glycine max
cccattatttctcacatttcc

SEQ ID NO: 3680 - DNA, 19 bp, Glycine max
gaagaatcatgtggtggtg

SEQ ID NO: 3681 - DNA, 18 bp, Glycine max
gcagctactttggaagca

SEQ ID NO: 3682 - DNA, 18 bp, Glycine max
gcattgctaacgcagagt

SEQ ID NO: 3683 - DNA, 18 bp, Glycine max
ccttccctccaattgtct

SEQ ID NO: 3684 - DNA, 18 bp, Glycine max
tccaacaaatgtgggact

SEQ ID NO: 3685 - DNA, 19 bp, Glycine max
aggcctttattcttcatgg

SEQ ID NO: 3686 - DNA, 18 bp, Glycine max
gaagaggctccaccagtt

SEQ ID NO: 3687 - DNA, 18 bp, Glycine max
cctcttgcttcatttcca

SEQ ID NO: 3688 - DNA, 18 bp, Glycine max
gctcatccattcgttgac

SEQ ID NO: 3689 - DNA, 18 bp, Glycine max
cgcttagctcttcctcct

SEQ ID NO: 3690 - DNA, 17 bp, Glycine max
ggcttgtcaaggcattt

SEQ ID NO: 3691 - DNA, 18 bp, Glycine max
agatgtgatgggttggtt

SEQ ID NO: 3692 - DNA, 18 bp, Glycine max
tggatgggatggttaaag

SEQ ID NO: 3693 - DNA, 18 bp, Glycine max
gtgaattcttgcctccag

SEQ ID NO: 3694 - DNA, 21 bp, Glycine max
tgatttcacgagatttagttt

SEQ ID NO: 3695 - DNA, 19 bp, Glycine max
ccggatgtgaattagtttg

SEQ ID NO: 3696 - DNA, 18 bp, Glycine max
ttgatgcacggttaatga

SEQ ID NO: 3697 - DNA, 21 bp, Glycine max
tggtcaaacaataagatcaca

SEQ ID NO: 3698 - DNA, 23 bp, Glycine max
aacattggattggataagataaa

SEQ ID NO: 3699 - DNA, 19 bp, Glycine max
tgccaatttgaatgaaaga

SEQ ID NO: 3700 - DNA, 19 bp, Glycine max
tttgaggcactccctattt

SEQ ID NO: 3701 - DNA, 18 bp, Glycine max
gtgggttgtgcaaacaat

SEQ ID NO: 3702 - DNA, 23 bp, Glycine max
ttcatttacataacaaatggaat

SEQ ID NO: 3703 - DNA, 24 bp, Glycine max
tttgaagtcaaagtcataaatgtt

SEQ ID NO: 3704 - DNA, 19 bp, Glycine max
tttcggttatgctatttcg

SEQ ID NO: 3705 - DNA, 19 bp, Glycine max
cggtctaatgacattggtt

SEQ ID NO: 3706 - DNA, 18 bp, Glycine max
atagatccgccgaatgat

SEQ ID NO: 3707 - DNA, 18 bp, Glycine max
gtgtgggtgagaagctga

SEQ ID NO: 3708 - DNA, 18 bp, Glycine max
ccattggcaaggttaggt

SEQ ID NO: 3709 - DNA, 20 bp, Glycine max
tttccaaactgagcaataca

SEQ ID NO: 3710 - DNA, 20 bp, Glycine max
aaactgccacattccttatt

SEQ ID NO: 3711 - DNA, 18 bp, Glycine max
gcaagcaaacaaccactc

SEQ ID NO: 3712 - DNA, 18 bp, Glycine max
gggagctaagttcctggt

SEQ ID NO: 3713 - DNA, 18 bp, Glycine max
ggcgggtacagagacaat

SEQ ID NO: 3714 - DNA, 18 bp, Glycine max
aaagcatgtgggtctcaa

SEQ ID NO: 3715 - DNA, 18 bp, Glycine max
ctcgttctttgccacatt

SEQ ID NO: 3716 - DNA, 17 bp, Glycine max
ctgcagcagctttgaca

SEQ ID NO: 3717 - DNA, 18 bp, Glycine max
atggccttcaatggattt

SEQ ID NO: 3718 - DNA, 20 bp, Glycine max
tcggtttctgatttgtcttt

SEQ ID NO: 3719 - DNA, 18 bp, Glycine max
gcgacatgtgctttcata

SEQ ID NO: 3720 - DNA, 20 bp, Glycine max
cagtgtggatgctttgtaga

SEQ ID NO: 3721 - DNA, 19 bp, Glycine max
cgtctgcatcttgttcttg

SEQ ID NO: 3722 - DNA, 18 bp, Glycine max
tttcttggcaccttgaga

SEQ ID NO: 3723 - DNA, 17 bp, Glycine max
ccatcctgatgccactt

SEQ ID NO: 3724 - DNA, 22 bp, Glycine max
aatttgatgttgtttgtgattt

SEQ ID NO: 3725 - DNA, 18 bp, Glycine max
tgcctttagccataacca

SEQ ID NO: 3726 - DNA, 23 bp, Glycine max
aatccagtttagtttgataatcg

SEQ ID NO: 3727 - DNA, 18 bp, Glycine max
gccttgacagaaagttgc

SEQ ID NO: 3728 - DNA, 19 bp, Glycine max
tgcatgcatgtttgtaaat

SEQ ID NO: 3729 - DNA, 18 bp, Glycine max
actccaccctgttcactg

SEQ ID NO: 3730 - DNA, 18 bp, Glycine max
cagtgaacagggtggagt

SEQ ID NO: 3731 - DNA, 18 bp, Glycine max
gcgaaagaaggagatgga

SEQ ID NO: 3732 - DNA, 23 bp, Glycine max
aaatgaattagaaagaaaggaaa

SEQ ID NO: 3733 - DNA, 18 bp, Glycine max
gctcatggtgcatttgat

SEQ ID NO: 3734 - DNA, 18 bp, Glycine max
cccacacaatccaacaaa

SEQ ID NO: 3735 - DNA, 22 bp, Glycine max
atatcacgtttacagaagattt

SEQ ID NO: 3736 - DNA, 20 bp, Glycine max
tccctttgactttgttgtct

SEQ ID NO: 3737 - DNA, 18 bp, Glycine max
ttgcaaacctctccttca

SEQ ID NO: 3738 - DNA, 18 bp, Glycine max
ctcctttcctccacaaca

SEQ ID NO: 3739 - DNA, 19 bp, Glycine max
tgacaacactctcctcacc

SEQ ID NO: 3740 - DNA, 18 bp, Glycine max
gccttggtacgtagttgg

SEQ ID NO: 3741 - DNA, 18 bp, Glycine max
agcatgacgtttcacaaa

SEQ ID NO: 3742 - DNA, 20 bp, Glycine max
atgacacatcatctagttcg

SEQ ID NO: 3743 - DNA, 18 bp, Glycine max
gtgtgggctttgtcattt

SEQ ID NO: 3744 - DNA, 18 bp, Glycine max
aaatgacaaagcccacac

SEQ ID NO: 3745 - DNA, 21 bp, Glycine max
aagatgaaggagcttgaattt

SEQ ID NO: 3746 - DNA, 18 bp, Glycine max
cgaatggaactcaccaaa

SEQ ID NO: 3747 - DNA, 18 bp, Glycine max
gccgtgtagttcgtcatt

SEQ ID NO: 3748 - DNA, 18 bp, Glycine max
gtcaatgaagcgcagact

SEQ ID NO: 3749 - DNA, 18 bp, Glycine max
ctagcgtcacccttacca

SEQ ID NO: 3750 - DNA, 19 bp, Glycine max
ccaaatttgagtgaatgga

SEQ ID NO: 3751 - DNA, 19 bp, Glycine max
aaggaaggacgaattgaaa

SEQ ID NO: 3752 - DNA, 18 bp, Glycine max
ttgcgaaccaggtttaat

SEQ ID NO: 3753 - DNA, 18 bp, Glycine max
caagcttcgaatgcaact

SEQ ID NO: 3754 - DNA, 18 bp, Glycine max
gccttggtacgtatttgg

SEQ ID NO: 3755 - DNA, 18 bp, Glycine max
agcatgacgtttcacaaa

SEQ ID NO: 3756 - DNA, 20 bp, Glycine max
cacatcatctagttcgagca

SEQ ID NO: 3757 - DNA, 18 bp, Glycine max
acggaggaaggactaacg

SEQ ID NO: 3758 - DNA, 18 bp, Glycine max
atgttgttggtgcatggt

SEQ ID NO: 3759 - DNA, 18 bp, Glycine max
gtggtgttcggttgtcat

SEQ ID NO: 3760 - DNA, 18 bp, Glycine max
ccgaacaccactgtcaat

SEQ ID NO: 3761 - DNA, 18 bp, Glycine max
caccacggttgtatccat

SEQ ID NO: 3762 - DNA, 18 bp, Glycine max
ccgaacaccactgtcaat

SEQ ID NO: 3763 - DNA, 18 bp, Glycine max
caccatatctgccaccat

SEQ ID NO: 3764 - DNA, 19 bp, Glycine max
ccaaatttgagtgaatgga

SEQ ID NO: 3765 - DNA, 19 bp, Glycine max
aaggaaggacgaagtgaaa

SEQ ID NO: 3766 - DNA, 18 bp, Glycine max
ttgcgaaccaggtttaat

SEQ ID NO: 3767 - DNA, 18 bp, Glycine max
caagcttcgaatgcaact

SEQ ID NO: 3768 - DNA, 19 bp, Glycine max
tttaatccaaacagtccaa

SEQ ID NO: 3769 - DNA, 21 bp, Glycine max
aaatcgatcagttcttgaaac

SEQ ID NO: 3770 - DNA, 20 bp, Glycine max
aaacacacacatcatcatcc

SEQ ID NO: 3771 - DNA, 19 bp, Glycine max
ttggcaatatatgcctgat

SEQ ID NO: 3772 - DNA, 18 bp, Glycine max
aaggccaatgatgtgatg

SEQ ID NO: 3773 - DNA, 18 bp, Glycine max
tgctttccacatgcttct

SEQ ID NO: 3774 - DNA, 18 bp, Glycine max
catatgcacccaccaagt

SEQ ID NO: 3775 - DNA, 18 bp, Glycine max
caacaaccatttggaacc

SEQ ID NO: 3776 - DNA, 18 bp, Glycine max
tctcttgatccacagcaa

SEQ ID NO: 3777 - DNA, 18 bp, Glycine max
gcttcttccaccaaacct

SEQ ID NO: 3778 - DNA, 18 bp, Glycine max
ccatgctggctgtgatac

SEQ ID NO: 3779 - DNA, 19 bp, Glycine max
tgtggttgaaatcttcacg

SEQ ID NO: 3780 - DNA, 18 bp, Glycine max
ggcgcacatcattaactt

SEQ ID NO: 3781 - DNA, 18 bp, Glycine max
accagaatgtgccatgag

SEQ ID NO: 3782 - DNA, 20 bp, Glycine max
caacttactgggttgggata

SEQ ID NO: 3783 - DNA, 23 bp, Glycine max
cactgatcataaatcttcattgt

SEQ ID NO: 3784 - DNA, 18 bp, Glycine max
tggaggaagaggatgaaa

SEQ ID NO: 3785 - DNA, 18 bp, Glycine max
cgggaataagacagagca

SEQ ID NO: 3786 - DNA, 18 bp, Glycine max
tggtgggaattctgagag

SEQ ID NO: 3787 - DNA, 19 bp, Glycine max
ttggctagttgagctgcta

SEQ ID NO: 3788 - DNA, 18 bp, Glycine max
gtttctgccttgaagctg

SEQ ID NO: 3789 - DNA, 18 bp, Glycine max
ttgtatgtgcacgcatgt

SEQ ID NO: 3790 - DNA, 18 bp, Glycine max
atggctcctggataaagc

SEQ ID NO: 3791 - DNA, 18 bp, Glycine max
ccaggcctaattgaggtt

SEQ ID NO: 3792 - DNA, 18 bp, Glycine max
aggcaaccctaccctatg

SEQ ID NO: 3793 - DNA, 18 bp, Glycine max
ctccaattgcgtcagtgt

SEQ ID NO: 3794 - DNA, 19 bp, Glycine max
aatcacactcactcgttgc

SEQ ID NO: 3795 - DNA, 18 bp, Glycine max
gaagattccgacgaggat

SEQ ID NO: 3796 - DNA, 21 bp, Glycine max
catgcgatgtaataattgaaa

SEQ ID NO: 3797 - DNA, 22 bp, Glycine max
tcctacaattgggtctaagttt

SEQ ID NO: 3798 - DNA, 21 bp, Glycine max
tcctctttcatagcctacttt

SEQ ID NO: 3799 - DNA, 18 bp, Glycine max
aagcacgttatgttgcat

SEQ ID NO: 3800 - DNA, 17 bp, Glycine max
cagggtcaccggaatac

SEQ ID NO: 3801 - DNA, 20 bp, Glycine max
aggatgatcttgactgttgg

SEQ ID NO: 3802 - DNA, 18 bp, Glycine max
accacgcatacacctcac

SEQ ID NO: 3803 - DNA, 19 bp, Glycine max
gtctctgcctagctccact

SEQ ID NO: 3804 - DNA, 20 bp, Glycine max
ttcactctccatattgcgta

SEQ ID NO: 3805 - DNA, 18 bp, Glycine max
ccaggttgcagtaatggt

SEQ ID NO: 3806 - DNA, 18 bp, Glycine max
caacgtggaagtgaagga

SEQ ID NO: 3807 - DNA, 18 bp, Glycine max
actgagacaaacgcaagg

SEQ ID NO: 3808 - DNA, 18 bp, Glycine max
ttgattgcaaagggtgtt

SEQ ID NO: 3809 - DNA, 18 bp, Glycine max
tcaaggccgtctctgtta

SEQ ID NO: 3810 - DNA, 19 bp, Glycine max
ttgcaccataaggtctctg

SEQ ID NO: 3811 - DNA, 22 bp, Glycine max
tgaatccaaatgtgaaataatc

SEQ ID NO: 3812 - DNA, 18 bp, Glycine max
tggtgagtcttggcattt

SEQ ID NO: 3813 - DNA, 19 bp, Glycine max
tgggaagtaaggttgttgg

SEQ ID NO: 3814 - DNA, 18 bp, Glycine max
aatgttgctcggtctcag

SEQ ID NO: 3815 - DNA, 25 bp, Glycine max
ttgttaatgttgaaataacttgaaa

SEQ ID NO: 3816 - DNA, 18 bp, Glycine max
tagcgaaccatccaagtc

SEQ ID NO: 3817 - DNA, 22 bp, Glycine max
tggtgaaagttatcatgaatgt

SEQ ID NO: 3818 - DNA, 21 bp, Glycine max
tgtgtttgatccaacttcttt

SEQ ID NO: 3819 - DNA, 18 bp, Glycine max
ttcgggttctgctatacg

SEQ ID NO: 3820 - DNA, 18 bp, Glycine max
aatctggacaccaaatcg

SEQ ID NO: 3821 - DNA, 18 bp, Glycine max
cctcctcgttgctgttta

SEQ ID NO: 3822 - DNA, 18 bp, Glycine max
tgcctcgtgagtcaagtt

SEQ ID NO: 3823 - DNA, 24 bp, Glycine max
aaatattctggactgactcaatta

SEQ ID NO: 3824 - DNA, 18 bp, Glycine max
tgcctcgtgagtcaagtt

SEQ ID NO: 3825 - DNA, 22 bp, Glycine max
ttgacaacactacttgagattt

SEQ ID NO: 3826 - DNA, 25 bp, Glycine max
tctgagtaaatctcaagtagtgttg

SEQ ID NO: 3827 - DNA, 21 bp, Glycine max
gaaaccaaacaagatgaaaca

SEQ ID NO: 3828 - DNA, 18 bp, Glycine max
gggtggtcacactcaaag

SEQ ID NO: 3829 - DNA, 22 bp, Glycine max
ctcatcaaatcatcaaagaatc

SEQ ID NO: 3830 - DNA, 18 bp, Glycine max
taggaccaccattgtcca

SEQ ID NO: 3831 - DNA, 18 bp, Glycine max
cgcgttcgagtttaagtg

SEQ ID NO: 3832 - DNA, 18 bp, Glycine max
gagcctgagagcatgaaa

SEQ ID NO: 3833 - DNA, 20 bp, Glycine max
ttgatcaaccaaataagaaa

SEQ ID NO: 3834 - DNA, 18 bp, Glycine max
tgaaattggaatggaagg

SEQ ID NO: 3835 - DNA, 18 bp, Glycine max
gcaccaatcatttccatc

SEQ ID NO: 3836 - DNA, 18 bp, Glycine max
tctcactctcaccgccta

SEQ ID NO: 3837 - DNA, 18 bp, Glycine max
caaattccagccattgag

SEQ ID NO: 3838 - DNA, 18 bp, Glycine max
actggacacaaggtgacg

SEQ ID NO: 3839 - DNA, 19 bp, Glycine max
ttcttcaacttccgaaaca

SEQ ID NO: 3840 - DNA, 18 bp, Glycine max
agggatcaacgacaatca

SEQ ID NO: 3841 - DNA, 18 bp, Glycine max
ggcgatctcattcatttg

SEQ ID NO: 3842 - DNA, 20 bp, Glycine max
gctctccaaatagctatcca

SEQ ID NO: 3843 - DNA, 22 bp, Glycine max
ccatgtttgaattaccattaca

SEQ ID NO: 3844 - DNA, 19 bp, Glycine max
tgattccctacaagctcaa

SEQ ID NO: 3845 - DNA, 24 bp, Glycine max
tcatcaattgaattagactttctt

SEQ ID NO: 3846 - DNA, 25 bp, Glycine max
caattgatgaatatatgtgagttgt

SEQ ID NO: 3847 - DNA, 22 bp, Glycine max
acaaatcataagtgtcgaatga

SEQ ID NO: 3848 - DNA, 18 bp, Glycine max
tgggccatggactagtta

SEQ ID NO: 3849 - DNA, 18 bp, Glycine max
aagcccaatagccttgac

SEQ ID NO: 3850 - DNA, 18 bp, Glycine max
ggcagaatcagtggacaa

SEQ ID NO: 3851 - DNA, 19 bp, Glycine max
agtggagcattcacagtca

SEQ ID NO: 3852 - DNA, 20 bp, Glycine max
ggaataacacttgaggcttg

SEQ ID NO: 3853 - DNA, 17 bp, Glycine max
aaatatgggtcgccaaa

SEQ ID NO: 3854 - DNA, 18 bp, Glycine max
atgcgggtgaggatctta

SEQ ID NO: 3855 - DNA, 20 bp, Glycine max
ttcatgaaatagatggcgta

SEQ ID NO: 3856 - DNA, 18 bp, Glycine max
ggcacggcttaatgttta

SEQ ID NO: 3857 - DNA, 18 bp, Glycine max
aatctgggcacactgaga

SEQ ID NO: 3858 - DNA, 20 bp, Glycine max
gacacgaaaggcctatagaa

SEQ ID NO: 3859 - DNA, 20 bp, Glycine max
tgttgagagagcatttgaca

SEQ ID NO: 3860 - DNA, 19 bp, Glycine max
gggcataggttgaaagtgt

SEQ ID NO: 3861 - DNA, 22 bp, Glycine max
aatttaatcagtgtttgtcacg

SEQ ID NO: 3862 - DNA, 21 bp, Glycine max
acgtgacaaacactgattaaa

SEQ ID NO: 3863 - DNA, 23 bp, Glycine max
aacaaagattgtgaatgtactaa

SEQ ID NO: 3864 - DNA, 25 bp, Glycine max
tcatttgttgacatagtattgattt

SEQ ID NO: 3865 - DNA, 18 bp, Glycine max
ttgcaattcttggacaaa

SEQ ID NO: 3866 - DNA, 19 bp, Glycine max
aggatttgcgcatctattt

SEQ ID NO: 3867 - DNA, 18 bp, Glycine max
acccaccgcttgaactac

SEQ ID NO: 3868 - DNA, 19 bp, Glycine max
aacgagggagagagagagg

SEQ ID NO: 3869 - DNA, 18 bp, Glycine max
ccaccgcttgaactacat

SEQ ID NO: 3870 - DNA, 22 bp, Glycine max
gtggatatcatcgttactgaaa

SEQ ID NO: 3871 - DNA, 18 bp, Glycine max
aaccaagcaagctcgata

SEQ ID NO: 3872 - DNA, 18 bp, Glycine max
cagcacagccaattcttt

SEQ ID NO: 3873 - DNA, 18 bp, Glycine max
ctccactcaaccctcctt

SEQ ID NO: 3874 - DNA, 23 bp, Glycine max
gtttgaaactttagttcaatctg

SEQ ID NO: 3875 - DNA, 22 bp, Glycine max
tgtaggtcctttcaagttcttt

SEQ ID NO: 3876 - DNA, 19 bp, Glycine max
cgttatgttgccttgttgt

SEQ ID NO: 3877 - DNA, 18 bp, Glycine max
acggagagaggagaggaa

SEQ ID NO: 3878 - DNA, 18 bp, Glycine max
tggaacgttcaccctaaa

SEQ ID NO: 3879 - DNA, 20 bp, Glycine max
accacatgcatagtgtctga

SEQ ID NO: 3880 - DNA, 20 bp, Glycine max
aagaaatgccaattgctaaa

SEQ ID NO: 3881 - DNA, 21 bp, Glycine max
tcaattgaatccaaactgaac

SEQ ID NO: 3882 - DNA, 22 bp, Glycine max
cattgatttgtgattgaatgat

SEQ ID NO: 3883 - DNA, 21 bp, Glycine max
acaatttgatgaggttcaact

SEQ ID NO: 3884 - DNA, 19 bp, Glycine max
aatccctgctgtttaatgc

SEQ ID NO: 3885 - DNA, 18 bp, Glycine max
tgcatgtttcgaaggttt

SEQ ID NO: 3886 - DNA, 17 bp, Glycine max
tcgccatggctatctct

SEQ ID NO: 3887 - DNA, 19 bp, Glycine max
cttccattaccacagcaaa

SEQ ID NO: 3888 - DNA, 21 bp, Glycine max
cactctcactttgttggaact

SEQ ID NO: 3889 - DNA, 20 bp, Glycine max
aaagaacaaggctgacctta

SEQ ID NO: 3890 - DNA, 18 bp, Glycine max
aatcagcgggttcaatta

SEQ ID NO: 3891 - DNA, 18 bp, Glycine max
tgtgaaggtgtgcacttg

SEQ ID NO: 3892 - DNA, 18 bp, Glycine max
cgccgttctctttctctt

SEQ ID NO: 3893 - DNA, 18 bp, Glycine max
tcttcgttgggactatgc

SEQ ID NO: 3894 - DNA, 22 bp, Glycine max
aaagaggcaaatgttaatgaat

SEQ ID NO: 3895 - DNA, 19 bp, Glycine max
ttgagctgagatgaggatg

SEQ ID NO: 3896 - DNA, 19 bp, Glycine max
agcaaactgtcgtgtgtgt

SEQ ID NO: 3897 - DNA, 18 bp, Glycine max
tgcatttgaggaccagtt

SEQ ID NO: 3898 - DNA, 23 bp, Glycine max
agtctaaggaagccttataggaa

SEQ ID NO: 3899 - DNA, 23 bp, Glycine max
aggatgggataatagaagaagtc

SEQ ID NO: 3900 - DNA, 18 bp, Glycine max
cgaaccatgatgcaattt

SEQ ID NO: 3901 - DNA, 20 bp, Glycine max
cagtcttggaagattcatgg

SEQ ID NO: 3902 - DNA, 18 bp, Glycine max
acgtggttgagaggcttt

SEQ ID NO: 3903 - DNA, 20 bp, Glycine max
gaaggttcaacagccttatg

SEQ ID NO: 3904 - DNA, 19 bp, Glycine max
tttgccttcagaacaattt

SEQ ID NO: 3905 - DNA, 20 bp, Glycine max
acagagttggttgaaagagc

SEQ ID NO: 3906 - DNA, 24 bp, Glycine max
aattagagaatttgattgaacttt

SEQ ID NO: 3907 - DNA, 18 bp, Glycine max
ttaatgatggacaccaaa

SEQ ID NO: 3908 - DNA, 18 bp, Glycine max
tggaggagaggctaccat

SEQ ID NO: 3909 - DNA, 18 bp, Glycine max
tggctcatcgacctgtat

SEQ ID NO: 3910 - DNA, 20 bp, Glycine max
agcatgtgattaggaagctc

SEQ ID NO: 3911 - DNA, 18 bp, Glycine max
caaagagaaacggattgg

SEQ ID NO: 3912 - DNA, 18 bp, Glycine max
cacatgtgcatgctgaga

SEQ ID NO: 3913 - DNA, 18 bp, Glycine max
tcgccaaaggcttagata

SEQ ID NO: 3914 - DNA, 19 bp, Glycine max
ttatgcatcggaaatgaaa

SEQ ID NO: 3915 - DNA, 18 bp, Glycine max
gggcaccattaagagaca

SEQ ID NO: 3916 - DNA, 19 bp, Glycine max
tggcatggttaagcattag

SEQ ID NO: 3917 - DNA, 20 bp, Glycine max
caaccaaacaaagatttgaa

SEQ ID NO: 3918 - DNA, 18 bp, Glycine max
ggatgagagggtggagat

SEQ ID NO: 3919 - DNA, 24 bp, Glycine max
aagtctcacaatagatttaccttt

SEQ ID NO: 3920 - DNA, 18 bp, Glycine max
atttgaaatcgcctcctc

SEQ ID NO: 3921 - DNA, 19 bp, Glycine max
gctcacattgctggaataa

SEQ ID NO: 3922 - DNA, 21 bp, Glycine max
aaccataagtttgaacccaat

SEQ ID NO: 3923 - DNA, 20 bp, Glycine max
gagggcaaatcaattatcag

SEQ ID NO: 3924 - DNA, 17 bp, Glycine max
gctttcgaagccaagaa

SEQ ID NO: 3925 - DNA, 19 bp, Glycine max
ggagagagagagaggagca

SEQ ID NO: 3926 - DNA, 18 bp, Glycine max
ctctctgccacttcctca

SEQ ID NO: 3927 - DNA, 18 bp, Glycine max
gggaggagccataggtta

SEQ ID NO: 3928 - DNA, 18 bp, Glycine max
tgttctgttccgttccat

SEQ ID NO: 3929 - DNA, 18 bp, Glycine max
ttcggcctagaagtagca

SEQ ID NO: 3930 - DNA, 18 bp, Glycine max
gcctttcagaagagcaaa

SEQ ID NO: 3931 - DNA, 21 bp, Glycine max
tcagaggaaatacctgacaga

SEQ ID NO: 3932 - DNA, 20 bp, Glycine max
aataaatgagacccaacaaa

SEQ ID NO: 3933 - DNA, 19 bp, Glycine max
gcacacaccctatctttca

SEQ ID NO: 3934 - DNA, 18 bp, Glycine max
cgcctacttccatccata

SEQ ID NO: 3935 - DNA, 18 bp, Glycine max
tagggcacacacacacac

SEQ ID NO: 3936 - DNA, 18 bp, Glycine max
cgcctacttccatccata

SEQ ID NO: 3937 - DNA, 18 bp, Glycine max
gtgagcgatccattcaaa

SEQ ID NO: 3938 - DNA, 23 bp, Glycine max
tttgaaacactgaataagaaact

SEQ ID NO: 3939 - DNA, 18 bp, Glycine max
atagggtccgcctaacaa

SEQ ID NO: 3940 - DNA, 19 bp, Glycine max
tgatcgtatgagtggtgct

SEQ ID NO: 3941 - DNA, 24 bp, Glycine max
ttcacgataaattatttgtttgtt

SEQ ID NO: 3942 - DNA, 19 bp, Glycine max
tctgttgttgcaaacttga

SEQ ID NO: 3943 - DNA, 17 bp, Glycine max
ccacgggtgtatggaag

SEQ ID NO: 3944 - DNA, 21 bp, Glycine max
cttcatttatctcctgacctg

SEQ ID NO: 3945 - DNA, 20 bp, Glycine max
tgcttacgtactccttgatg

SEQ ID NO: 3946 - DNA, 20 bp, Glycine max
tctctcgaattgtttccttt

SEQ ID NO: 3947 - DNA, 20 bp, Glycine max
aaagcaaatacacccttcaa

SEQ ID NO: 3948 - DNA, 19 bp, Glycine max
aaatggagaggcagtcttt

SEQ ID NO: 3949 - DNA, 18 bp, Glycine max
catgtgtagcgcaatgtt

SEQ ID NO: 3950 - DNA, 19 bp, Glycine max
aattgtcgaatgcaaatga

SEQ ID NO: 3951 - DNA, 19 bp, Glycine max
cacaagcagtgtttgaacc

SEQ ID NO: 3952 - DNA, 18 bp, Glycine max
gcagccttgtcaagaaac

SEQ ID NO: 3953 - DNA, 21 bp, Glycine max
aatggtttatagctcttgcat

SEQ ID NO: 3954 - DNA, 18 bp, Glycine max
ttaatccctggcttgaca

SEQ ID NO: 3955 - DNA, 18 bp, Glycine max
tacctcaccgtgattcaa

SEQ ID NO: 3956 - DNA, 20 bp, Glycine max
tttacgggctaacttgattt

SEQ ID NO: 3957 - DNA, 24 bp, Glycine max
ttggtaaatagagagtaataaacg

SEQ ID NO: 3958 - DNA, 24 bp, Glycine max
tcgagtattgtatttgaatgattt

SEQ ID NO: 3959 - DNA, 18 bp, Glycine max
tcgagcgtttgtcttctc

SEQ ID NO: 3960 - DNA, 20 bp, Glycine max
gacgtccgttaatttacacc

SEQ ID NO: 3961 - DNA, 19 bp, Glycine max
tggagggaagagatgactc

SEQ ID NO: 3962 - DNA, 18 bp, Glycine max
tggtaggccaagttctca

SEQ ID NO: 3963 - DNA, 23 bp, Glycine max
agagactttgtttgtattcaggt

SEQ ID NO: 3964 - DNA, 18 bp, Glycine max
cgctacacccaacttctg

SEQ ID NO: 3965 - DNA, 21 bp, Glycine max
catgtcctttaacacacattt

SEQ ID NO: 3966 - DNA, 24 bp, Glycine max
tttcagctttaaactagttgattt

SEQ ID NO: 3967 - DNA, 19 bp, Glycine max
caccatgtgttccaattct

SEQ ID NO: 3968 - DNA, 18 bp, Glycine max
tcaagccatatgcaaaca

SEQ ID NO: 3969 - DNA, 18 bp, Glycine max
catgtagccgacttcacc

SEQ ID NO: 3970 - DNA, 18 bp, Glycine max
ggaaatcctaggcgtgat

SEQ ID NO: 3971 - DNA, 19 bp, Glycine max
tgcaaataatcagggtgtg

SEQ ID NO: 3972 - DNA, 20 bp, Glycine max
ccttaattcaagcaaggaaa

SEQ ID NO: 3973 - DNA, 17 bp, Glycine max
ccgttgccactagctct

SEQ ID NO: 3974 - DNA, 18 bp, Glycine max
ggttgactggatggttga

SEQ ID NO: 3975 - DNA, 22 bp, Glycine max
tcgacaaatattggttgttaat

SEQ ID NO: 3976 - DNA, 18 bp, Glycine max
tcaacgtttgattcctga

SEQ ID NO: 3977 - DNA, 18 bp, Glycine max
tacacgctcttcctccaa

SEQ ID NO: 3978 - DNA, 21 bp, Glycine max
aaagagataatcaaatcacca

SEQ ID NO: 3979 - DNA, 24 bp, Glycine max
tttctaaatttgacttaagatgat

SEQ ID NO: 3980 - DNA, 21 bp, Glycine max
aaagagataatcaaatcacca

SEQ ID NO: 3981 - DNA, 24 bp, Glycine max
tttctaaatttgacttaagatgat

SEQ ID NO: 3982 - DNA, 19 bp, Glycine max
ccaagcgttacgcataata

SEQ ID NO: 3983 - DNA, 18 bp, Glycine max
tccttcagtcaccaatgc

SEQ ID NO: 3984 - DNA, 18 bp, Glycine max
accgattaccatccatga

SEQ ID NO: 3985 - DNA, 18 bp, Glycine max
tggtcttcatttgcatca

SEQ ID NO: 3986 - DNA, 18 bp, Glycine max
catggtggtggagagaaa

SEQ ID NO: 3987 - DNA, 22 bp, Glycine max
gacaccacactagtcaatcaga

SEQ ID NO: 3988 - DNA, 18 bp, Glycine max
tcctgccatcttgctaaa

SEQ ID NO: 3989 - DNA, 18 bp, Glycine max
ttgccatttcccttacaa

SEQ ID NO: 3990 - DNA, 19 bp, Glycine max
cccttcatcattcttcaca

SEQ ID NO: 3991 - DNA, 18 bp, Glycine max
tggagaagccattctctg

SEQ ID NO: 3992 - DNA, 18 bp, Glycine max
tccttgtggagacacctg

SEQ ID NO: 3993 - DNA, 18 bp, Glycine max
atggtagcagtggtggtg

SEQ ID NO: 3994 - DNA, 18 bp, Glycine max
ctcctcctccctgtcaat

SEQ ID NO: 3995 - DNA, 18 bp, Glycine max
ggttgcaattctgtggac

SEQ ID NO: 3996 - DNA, 18 bp, Glycine max
gtcaatcaccaccaccac

SEQ ID NO: 3997 - DNA, 18 bp, Glycine max
ggttgcaattctgtggac

SEQ ID NO: 3998 - DNA, 18 bp, Glycine max
tccctcttgtccacagaa

SEQ ID NO: 3999 - DNA, 17 bp, Glycine max
ttggtacacctggcaca

SEQ ID NO: 4000 - DNA, 18 bp, Glycine max
accaaatcaagacgatgg

SEQ ID NO: 4001 - DNA, 21 bp, Glycine max
ttcaaacaagcagagtagagg

SEQ ID NO: 4002 - DNA, 24 bp, Glycine max
ccctaaatcttatagaccaaagaa

SEQ ID NO: 4003 - DNA, 21 bp, Glycine max
ccctcactgattatgttgtgt

SEQ ID NO: 4004 - DNA, 23 bp, Glycine max
aaagaaatgaaatggagtacagt

SEQ ID NO: 4005 - DNA, 18 bp, Glycine max
ccaaacacatgggaagag

SEQ ID NO: 4006 - DNA, 18 bp, Glycine max
cggatcgatttccataca

SEQ ID NO: 4007 - DNA, 17 bp, Glycine max
atcgggaaatgggagat

SEQ ID NO: 4008 - DNA, 20 bp, Glycine max
tgtggaaagttaatgggttt

SEQ ID NO: 4009 - DNA, 20 bp, Glycine max
acggtcgttgattaagaaat

SEQ ID NO: 4010 - DNA, 18 bp, Glycine max
ttgcagactcctgcagat

SEQ ID NO: 4011 - DNA, 22 bp, Glycine max
tcgtattcattacttgaactgg

SEQ ID NO: 4012 - DNA, 20 bp, Glycine max
agcaacgtaatcgacattct

SEQ ID NO: 4013 - DNA, 24 bp, Glycine max
tgtctaaaggaaactagttagcaa

SEQ ID NO: 4014 - DNA, 22 bp, Glycine max
tcttgatttggtgaactaagaa

SEQ ID NO: 4015 - DNA, 23 bp, Glycine max
tctttacctaataatttgggttt

SEQ ID NO: 4016 - DNA, 19 bp, Glycine max
cggataagttccttccttg

SEQ ID NO: 4017 - DNA, 18 bp, Glycine max
gacgtaacacgagggaga

SEQ ID NO: 4018 - DNA, 19 bp, Glycine max
ggatcgattcgtcaagatt

SEQ ID NO: 4019 - DNA, 19 bp, Glycine max
aaagagcaattctccaaca

SEQ ID NO: 4020 - DNA, 20 bp, Glycine max
aaactgccctaccttatcct

SEQ ID NO: 4021 - DNA, 18 bp, Glycine max
gtcgcatggctctgtaat

SEQ ID NO: 4022 - DNA, 18 bp, Glycine max
ttgaggctccatgtcatc

SEQ ID NO: 4023 - DNA, 22 bp, Glycine max
tgtatacgagaatttgcttacg

SEQ ID NO: 4024 - DNA, 21 bp, Glycine max
gacctgtgtattatgcggtta

SEQ ID NO: 4025 - DNA, 21 bp, Glycine max
tttcttcttcatcctgagatt

SEQ ID NO: 4026 - DNA, 22 bp, Glycine max
tttaatgcatttctcaatttct

SEQ ID NO: 4027 - DNA, 19 bp, Glycine max
tgtccgaatcaaagaaaga

SEQ ID NO: 4028 - DNA, 18 bp, Glycine max
catgtggtcctacccaga

SEQ ID NO: 4029 - DNA, 18 bp, Glycine max
aattcgctatccctttgc

SEQ ID NO: 4030 - DNA, 20 bp, Glycine max
caccgttgaataagaaatca

SEQ ID NO: 4031 - DNA, 18 bp, Glycine max
taggctgtgggtcgagta

SEQ ID NO: 4032 - DNA, 18 bp, Glycine max
aaggaacgtggctcctaa

SEQ ID NO: 4033 - DNA, 18 bp, Glycine max
tccgagtttgcgattaga

SEQ ID NO: 4034 - DNA, 19 bp, Glycine max
gattgaactcacccacaaa

SEQ ID NO: 4035 - DNA, 18 bp, Glycine max
tgtttcagcaagatcacg

SEQ ID NO: 4036 - DNA, 18 bp, Glycine max
atttggttgcagaatgga

SEQ ID NO: 4037 - DNA, 18 bp, Glycine max
ggcttcttggagattggt

SEQ ID NO: 4038 - DNA, 18 bp, Glycine max
gagtgtttatgcccatgc

SEQ ID NO: 4039 - DNA, 19 bp, Glycine max
cggagtcaagtgttctgac

SEQ ID NO: 4040 - DNA, 20 bp, Glycine max
ctgctgatttggtcctactt

SEQ ID NO: 4041 - DNA, 18 bp, Glycine max
ccgaaagactcccacagt

SEQ ID NO: 4042 - DNA, 18 bp, Glycine max
tgtaccctgaaaccgaaa

SEQ ID NO: 4043 - DNA, 18 bp, Glycine max
ctggttctttccatgtcg

SEQ ID NO: 4044 - DNA, 18 bp, Glycine max
cccatggtcatgtttgaa

SEQ ID NO: 4045 - DNA, 19 bp, Glycine max
tcgtgttcttgcacgtatt

SEQ ID NO: 4046 - DNA, 22 bp, Glycine max
tgaataagtggaagagagtcaa

SEQ ID NO: 4047 - DNA, 23 bp, Glycine max
tcttaaggcattgattaacattt

SEQ ID NO: 4048 - DNA, 18 bp, Glycine max
ctttcctcgcgcataata

SEQ ID NO: 4049 - DNA, 19 bp, Glycine max
tttggcaaatttctttcaa

SEQ ID NO: 4050 - DNA, 18 bp, Glycine max
ctttcctcgcgcataata

SEQ ID NO: 4051 - DNA, 19 bp, Glycine max
tttggcaaatttctttcaa

SEQ ID NO: 4052 - DNA, 18 bp, Glycine max
tgtggtgcatgctctatg

SEQ ID NO: 4053 - DNA, 18 bp, Glycine max
ggaccagggtctaacgaa

SEQ ID NO: 4054 - DNA, 18 bp, Glycine max
cccttaccaatccaatcc

SEQ ID NO: 4055 - DNA, 18 bp, Glycine max
cctgattgacctcttcca

SEQ ID NO: 4056 - DNA, 18 bp, Glycine max
tggagtcgttggagaaga

SEQ ID NO: 4057 - DNA, 24 bp, Glycine max
ggactaaagtcactattaaccaca

SEQ ID NO: 4058 - DNA, 24 bp, Glycine max
tgtgcattaaatatacattagaaa

SEQ ID NO: 4059 - DNA, 19 bp, Glycine max
tttgtcacctattggctca

SEQ ID NO: 4060 - DNA, 18 bp, Glycine max
gcacaaaggactgcaaag

SEQ ID NO: 4061 - DNA, 18 bp, Glycine max
aacaataccggacagttt

SEQ ID NO: 4062 - DNA, 20 bp, Glycine max
ccatccgtagtaatatgtgc

SEQ ID NO: 4063 - DNA, 18 bp, Glycine max
tggctttgcttgtcgtat

SEQ ID NO: 4064 - DNA, 18 bp, Glycine max
tgatgaatgcaacgagtg

SEQ ID NO: 4065 - DNA, 18 bp, Glycine max
aggaaggccatcatcatt

SEQ ID NO: 4066 - DNA, 22 bp, Glycine max
ccaataattgtccaataactca

SEQ ID NO: 4067 - DNA, 18 bp, Glycine max
ctcaatccctcacgacct

SEQ ID NO: 4068 - DNA, 17 bp, Glycine max
ggcttgcaggctaaatg

SEQ ID NO: 4069 - DNA, 18 bp, Glycine max
gcccgactagttctccaa

SEQ ID NO: 4070 - DNA, 18 bp, Glycine max
ggaagaggcagaggagaa

SEQ ID NO: 4071 - DNA, 25 bp, Glycine max
tcatcaaagaacaattatttaacag

SEQ ID NO: 4072 - DNA, 18 bp, Glycine max
cccaaagactcaaagctc

SEQ ID NO: 4073 - DNA, 21 bp, Glycine max
aagaattgatggaataagagg

SEQ ID NO: 4074 - DNA, 18 bp, Glycine max
tgtggattcgacacttga

SEQ ID NO: 4075 - DNA, 18 bp, Glycine max
tagcaagtcgcatagcaa

SEQ ID NO: 4076 - DNA, 20 bp, Glycine max
ccctctctcctatccttctt

SEQ ID NO: 4077 - DNA, 19 bp, Glycine max
acaaggtttctacccgtct

SEQ ID NO: 4078 - DNA, 18 bp, Glycine max
ttccaaaccattcaggtg

SEQ ID NO: 4079 - DNA, 20 bp, Glycine max
ccagaacagttgaagagtga

SEQ ID NO: 4080 - DNA, 18 bp, Glycine max
gcatgtgtgatccttcct

SEQ ID NO: 4081 - DNA, 18 bp, Glycine max
ttccctttaatggctgct

SEQ ID NO: 4082 - DNA, 18 bp, Glycine max
gcagccattaaagggaat

SEQ ID NO: 4083 - DNA, 18 bp, Glycine max
atcgcagaggacacattt

SEQ ID NO: 4084 - DNA, 18 bp, Glycine max
ttgcctctgggattgtaa

SEQ ID NO: 4085 - DNA, 18 bp, Glycine max
ccagcaatccagaacaga

SEQ ID NO: 4086 - DNA, 18 bp, Glycine max
tgctgggttgtttcttgt

SEQ ID NO: 4087 - DNA, 18 bp, Glycine max
cctctgttgacaccatgc

SEQ ID NO: 4088 - DNA, 19 bp, Glycine max
aacgacaatgaagtttgaa

SEQ ID NO: 4089 - DNA, 21 bp, Glycine max
aaccttaatcggaaataatga

SEQ ID NO: 4090 - DNA, 18 bp, Glycine max
gcgtgaccttatgcaatc

SEQ ID NO: 4091 - DNA, 18 bp, Glycine max
atgcaccctttctcttcc

SEQ ID NO: 4092 - DNA, 19 bp, Glycine max
acctcttgacatccctcag

SEQ ID NO: 4093 - DNA, 21 bp, Glycine max
ttggatctttgagaagtgaaa

SEQ ID NO: 4094 - DNA, 21 bp, Glycine max
ccttacaattggattctgatg

SEQ ID NO: 4095 - DNA, 18 bp, Glycine max
tgcaactcttggtttggt

SEQ ID NO: 4096 - DNA, 19 bp, Glycine max
ccaagaaacagatgtgtgc

SEQ ID NO: 4097 - DNA, 20 bp, Glycine max
ctttggtttcctaatcctga

SEQ ID NO: 4098 - DNA, 20 bp, Glycine max
tcaggattaggaaaccaaag

SEQ ID NO: 4099 - DNA, 18 bp, Glycine max
caatacatgctgccacaa

SEQ ID NO: 4100 - DNA, 18 bp, Glycine max
cgcatcaccaatgagatt

SEQ ID NO: 4101 - DNA, 18 bp, Glycine max
tgagtcacggtgtgtgtg

SEQ ID NO: 4102 - DNA, 18 bp, Glycine max
tcttgatccttgccctta

SEQ ID NO: 4103 - DNA, 18 bp, Glycine max
ggtacggatcctggagtt

SEQ ID NO: 4104 - DNA, 19 bp, Glycine max
tctggaagacacgttcaaa

SEQ ID NO: 4105 - DNA, 18 bp, Glycine max
accgcgacaggtagactt

SEQ ID NO: 4106 - DNA, 18 bp, Glycine max
cattcaatgcctttgtcc

SEQ ID NO: 4107 - DNA, 19 bp, Glycine max
tccattattgttcgcagag

SEQ ID NO: 4108 - DNA, 19 bp, Glycine max
caatgaagcaagagtgcat

SEQ ID NO: 4109 - DNA, 18 bp, Glycine max
caaagtcacgacccttca

SEQ ID NO: 4110 - DNA, 17 bp, Glycine max
gagggtgagccatgaga

SEQ ID NO: 4111 - DNA, 19 bp, Glycine max
aaacgaggcagggtaataa

SEQ ID NO: 4112 - DNA, 21 bp, Glycine max
aagctgagtggatagaatcaa

SEQ ID NO: 4113 - DNA, 22 bp, Glycine max
ggaatgagacgttcatacataa

SEQ ID NO: 4114 - DNA, 18 bp, Glycine max
tccagcaagagaagttgg

SEQ ID NO: 4115 - DNA, 18 bp, Glycine max
gcaaggtgctcaatgaat

SEQ ID NO: 4116 - DNA, 20 bp, Glycine max
acgtgttgtcatttgatacg

SEQ ID NO: 4117 - DNA, 18 bp, Glycine max
caaaggcacaaaccaaag

SEQ ID NO: 4118 - DNA, 23 bp, Glycine max
tttgtattgtttctacatgcaac

SEQ ID NO: 4119 - DNA, 19 bp, Glycine max
tgaggacattccatttacg

SEQ ID NO: 4120 - DNA, 21 bp, Glycine max
cactgaagcaacattatcaaa

SEQ ID NO: 4121 - DNA, 18 bp, Glycine max
ggatttgacccaagaaca

SEQ ID NO: 4122 - DNA, 22 bp, Glycine max
agaagcttatccaaataggact

SEQ ID NO: 4123 - DNA, 23 bp, Glycine max
aaatatttcttgctttcaaagtt

SEQ ID NO: 4124 - DNA, 22 bp, Glycine max
agaagcttatccaaataggact

SEQ ID NO: 4125 - DNA, 23 bp, Glycine max
aaatatttcttgctttcaaagtt

SEQ ID NO: 4126 - DNA, 17 bp, Glycine max
attgtagggtccgcatc

SEQ ID NO: 4127 - DNA, 21 bp, Glycine max
tttgcaacctttagttaattt

SEQ ID NO: 4128 - DNA, 18 bp, Glycine max
gaccatgcctgttgtttc

SEQ ID NO: 4129 - DNA, 18 bp, Glycine max
atatttcacgccacatgc

SEQ ID NO: 4130 - DNA, 18 bp, Glycine max
tggttggctagcttgttc

SEQ ID NO: 4131 - DNA, 19 bp, Glycine max
cggaattaggactctccac

SEQ ID NO: 4132 - DNA, 18 bp, Glycine max
tcaaaggaaacgtgttgg

SEQ ID NO: 4133 - DNA, 19 bp, Glycine max
ttcatcttcctctccgatt

SEQ ID NO: 4134 - DNA, 19 bp, Glycine max
tttcctgttggtctttgaa

SEQ ID NO: 4135 - DNA, 20 bp, Glycine max
aggagacaagatcaatttgg

SEQ ID NO: 4136 - DNA, 18 bp, Glycine max
tttcagtgaggctggcta

SEQ ID NO: 4137 - DNA, 18 bp, Glycine max
ggctttgccaagaagttt

SEQ ID NO: 4138 - DNA, 18 bp, Glycine max
ttggagcttgagtgcttc

SEQ ID NO: 4139 - DNA, 18 bp, Glycine max
aatggtgatgctgcaagt

SEQ ID NO: 4140 - DNA, 18 bp, Glycine max
ttggagcttgagtgcttc

SEQ ID NO: 4141 - DNA, 18 bp, Glycine max
aatggtgatgctgcaagt

SEQ ID NO: 4142 - DNA, 22 bp, Glycine max
aatgtaagtcctcctctctttc

SEQ ID NO: 4143 - DNA, 18 bp, Glycine max
cacacgtcggctagaaac

SEQ ID NO: 4144 - DNA, 19 bp, Glycine max
aggccgattaagtttagaa

SEQ ID NO: 4145 - DNA, 21 bp, Glycine max
tgggacaaatagaaagtcaaa

SEQ ID NO: 4146 - DNA, 23 bp, Glycine max
tgaatggttgtttatgtatcatt

SEQ ID NO: 4147 - DNA, 18 bp, Glycine max
tcatcactttgcaacacg

SEQ ID NO: 4148 - DNA, 18 bp, Glycine max
cgtgttgcaaagtgatga

SEQ ID NO: 4149 - DNA, 18 bp, Glycine max
atgttcctgtgcctgttg

SEQ ID NO: 4150 - DNA, 18 bp, Glycine max
agacgcaactgcagaaga

SEQ ID NO: 4151 - DNA, 18 bp, Glycine max
gcatggcttgattcactt

SEQ ID NO: 4152 - DNA, 18 bp, Glycine max
ttaatgctgttgggatgg

SEQ ID NO: 4153 - DNA, 18 bp, Glycine max
aatacatggcaagcatgg

SEQ ID NO: 4154 - DNA, 18 bp, Glycine max
tgtttgcaacacacgttc

SEQ ID NO: 4155 - DNA, 18 bp, Glycine max
ggctggacaagattacca

SEQ ID NO: 4156 - DNA, 18 bp, Glycine max
gctcgtgattctgtgtcc

SEQ ID NO: 4157 - DNA, 22 bp, Glycine max
tgtttctctctttctttcacct

SEQ ID NO: 4158 - DNA, 18 bp, Glycine max
attggcaatgcatgtgat

SEQ ID NO: 4159 - DNA, 18 bp, Glycine max
tgagcctcccaactgtta

SEQ ID NO: 4160 - DNA, 18 bp, Glycine max
agcagagaaccatgctca

SEQ ID NO: 4161 - DNA, 20 bp, Glycine max
gtgataggctaattcgttgg

SEQ ID NO: 4162 - DNA, 18 bp, Glycine max
tcatcttgaatccgtggt

SEQ ID NO: 4163 - DNA, 18 bp, Glycine max
cactggctggtaccgttt

SEQ ID NO: 4164 - DNA, 19 bp, Glycine max
ttgtttcatgtgctgtcaa

SEQ ID NO: 4165 - DNA, 18 bp, Glycine max
caccaacaaagccacttc

SEQ ID NO: 4166 - DNA, 18 bp, Glycine max
tcattgaaggcgacatct

SEQ ID NO: 4167 - DNA, 22 bp, Glycine max
tgttcacttctattctttgcac

SEQ ID NO: 4168 - DNA, 18 bp, Glycine max
tcaccacaatcaccatca

SEQ ID NO: 4169 - DNA, 17 bp, Glycine max
gtgtctcgtgcccaaat

SEQ ID NO: 4170 - DNA, 20 bp, Glycine max
ggtatttgaaaccgaaacaa

SEQ ID NO: 4171 - DNA, 21 bp, Glycine max
aagagatcaaatacaccacct

SEQ ID NO: 4172 - DNA, 18 bp, Glycine max
ttgccctgttgtatgagc

SEQ ID NO: 4173 - DNA, 18 bp, Glycine max
tcgcatgtggatctagtg

SEQ ID NO: 4174 - DNA, 22 bp, Glycine max
tcaagatgtcgattaatgtttc

SEQ ID NO: 4175 - DNA, 19 bp, Glycine max
agcataaacgaactcacca

SEQ ID NO: 4176 - DNA, 19 bp, Glycine max
gaccatgatgatggaagaa

SEQ ID NO: 4177 - DNA, 18 bp, Glycine max
aggacaaatggtggacct

SEQ ID NO: 4178 - DNA, 19 bp, Glycine max
agggaccaaattacaaagc

SEQ ID NO: 4179 - DNA, 18 bp, Glycine max
tttgatcaatgcaaatca

SEQ ID NO: 4180 - DNA, 18 bp, Glycine max
cgagttgttctgcatcaa

SEQ ID NO: 4181 - DNA, 18 bp, Glycine max
cttctgcggtattctgct

SEQ ID NO: 4182 - DNA, 18 bp, Glycine max
gcttgctcacaccatacc

SEQ ID NO: 4183 - DNA, 20 bp, Glycine max
tgattgtcgagagagttgtg

SEQ ID NO: 4184 - DNA, 18 bp, Glycine max
gcaagagcatcgaaagaa

SEQ ID NO: 4185 - DNA, 18 bp, Glycine max
gttggtacggtgttggtc

SEQ ID NO: 4186 - DNA, 18 bp, Glycine max
ggccttaattgagctcct

SEQ ID NO: 4187 - DNA, 18 bp, Glycine max
gcaaatggagttgggatt

SEQ ID NO: 4188 - DNA, 19 bp, Glycine max
aactcggcattgaataaca

SEQ ID NO: 4189 - DNA, 25 bp, Glycine max
tgtaaacatataacatcagtacaaa

SEQ ID NO: 4190 - DNA, 19 bp, Glycine max
tgcatgcatacacacacac

SEQ ID NO: 4191 - DNA, 22 bp, Glycine max
tgtgtgaatattgaattatttg

SEQ ID NO: 4192 - DNA, 20 bp, Glycine max
cgaataggattcagccatac

SEQ ID NO: 4193 - DNA, 18 bp, Glycine max
ttagggaccgaggaattt

SEQ ID NO: 4194 - DNA, 20 bp, Glycine max
cgaataggattcagccatac

SEQ ID NO: 4195 - DNA, 18 bp, Glycine max
ttagggaccgaggaattt

SEQ ID NO: 4196 - DNA, 18 bp, Glycine max
aacacggaatacgttcca

SEQ ID NO: 4197 - DNA, 22 bp, Glycine max
tgttcaacaattgaagatcact

SEQ ID NO: 4198 - DNA, 18 bp, Glycine max
tgaaccctggaaaccata

SEQ ID NO: 4199 - DNA, 18 bp, Glycine max
gcgttctcaccctctctt

SEQ ID NO: 4200 - DNA, 18 bp, Glycine max
tgaaccctggaaaccata

SEQ ID NO: 4201 - DNA, 18 bp, Glycine max
gcgttctcaccctctctt

SEQ ID NO: 4202 - DNA, 19 bp, Glycine max
catttaaccatccaatcca

SEQ ID NO: 4203 - DNA, 22 bp, Glycine max
tgacttaatagttggaaagtgg

SEQ ID NO: 4204 - DNA, 17 bp, Glycine max
tgcatgggaacgtgtaa

SEQ ID NO: 4205 - DNA, 19 bp, Glycine max
ttccttcctcaacatagcc

SEQ ID NO: 4206 - DNA, 23 bp, Glycine max
ccgtgatactagttcttgagttg

SEQ ID NO: 4207 - DNA, 19 bp, Glycine max
tgcgtaatcaacctttgaa

SEQ ID NO: 4208 - DNA, 18 bp, Glycine max
catgccatcgtttcatct

SEQ ID NO: 4209 - DNA, 19 bp, Glycine max
aaatgtcacgtgaggagtg

SEQ ID NO: 4210 - DNA, 20 bp, Glycine max
tggatcgaacaagtaagtga

SEQ ID NO: 4211 - DNA, 18 bp, Glycine max
tctgccagcgtatgaaat

SEQ ID NO: 4212 - DNA, 18 bp, Glycine max
ttcacagcatgccaaata

SEQ ID NO: 4213 - DNA, 19 bp, Glycine max
cccacctagtgggataaga

SEQ ID NO: 4214 - DNA, 20 bp, Glycine max
ctgaaactgtgaagtgagca

SEQ ID NO: 4215 - DNA, 18 bp, Glycine max
tcagcgtatggtgagtcc

SEQ ID NO: 4216 - DNA, 19 bp, Glycine max
aatgccatggataaacacc

SEQ ID NO: 4217 - DNA, 25 bp, Glycine max
tatataatttaatctctcctcatgt

SEQ ID NO: 4218 - DNA, 17 bp, Glycine max
atgggcttgacccatta

SEQ ID NO: 4219 - DNA, 19 bp, Glycine max
cgtgatgatgacgatgatt

SEQ ID NO: 4220 - DNA, 18 bp, Glycine max
atcacgtcaccatcacct

SEQ ID NO: 4221 - DNA, 17 bp, Glycine max
gtcggtggtgattgctt

SEQ ID NO: 4222 - DNA, 19 bp, Glycine max
ttgcatgtggtttgatctt

SEQ ID NO: 4223 - DNA, 18 bp, Glycine max
acaaggctaatgcccaat

SEQ ID NO: 4224 - DNA, 22 bp, Glycine max
tcacgttacattatcacatcaa

SEQ ID NO: 4225 - DNA, 19 bp, Glycine max
ggctgacagacagatttca

SEQ ID NO: 4226 - DNA, 21 bp, Glycine max
gctcaaactctattgttgtcg

SEQ ID NO: 4227 - DNA, 18 bp, Glycine max
tcattcccattcatgtcc

SEQ ID NO: 4228 - DNA, 18 bp, Glycine max
gcgtgcagataaaccaaa

SEQ ID NO: 4229 - DNA, 19 bp, Glycine max
tcacaaatagcaggccata

SEQ ID NO: 4230 - DNA, 18 bp, Glycine max
ccatggatactccacctg

SEQ ID NO: 4231 - DNA, 18 bp, Glycine max
caatgatcgtagccgtgt

SEQ ID NO: 4232 - DNA, 20 bp, Glycine max
ggatgctaatttccatcaag

SEQ ID NO: 4233 - DNA, 19 bp, Glycine max
ggttccactcattcgtctc

SEQ ID NO: 4234 - DNA, 18 bp, Glycine max
tgcaatcccaatttgtct

SEQ ID NO: 4235 - DNA, 20 bp, Glycine max
ttcaagacattggataatgg

SEQ ID NO: 4236 - DNA, 18 bp, Glycine max
caacactgccctgctatc

SEQ ID NO: 4237 - DNA, 18 bp, Glycine max
atgctctcatttggctct

SEQ ID NO: 4238 - DNA, 18 bp, Glycine max
gccaaatgagagcatgag

SEQ ID NO: 4239 - DNA, 18 bp, Glycine max
tgtgcatgcgtgtaagag

SEQ ID NO: 4240 - DNA, 20 bp, Glycine max
caggaggactagaattgcat

SEQ ID NO: 4241 - DNA, 21 bp, Glycine max
tttcagtaataaatgagcaaa

SEQ ID NO: 4242 - DNA, 17 bp, Glycine max
cctggtcgtcgaagagt

SEQ ID NO: 4243 - DNA, 18 bp, Glycine max
ccacgttctcatctctcg

SEQ ID NO: 4244 - DNA, 22 bp, Glycine max
aaatcatcaatgacctaaattg

SEQ ID NO: 4245 - DNA, 25 bp, Glycine max
actctatcgaacttataaagataaa

SEQ ID NO: 4246 - DNA, 18 bp, Glycine max
ttgtccactatcccgatg

SEQ ID NO: 4247 - DNA, 18 bp, Glycine max
tacctcccaacaatccaa

SEQ ID NO: 4248 - DNA, 18 bp, Glycine max
tccaagcatggttgtagg

SEQ ID NO: 4249 - DNA, 18 bp, Glycine max
ggcgactcttctccattt

SEQ ID NO: 4250 - DNA, 19 bp, Glycine max
tcatttcagttccgtagca

SEQ ID NO: 4251 - DNA, 18 bp, Glycine max
gagagtgggtgaaacacg

SEQ ID NO: 4252 - DNA, 20 bp, Glycine max
ttgcttatgtcttggacact

SEQ ID NO: 4253 - DNA, 21 bp, Glycine max
tcttccatgaaatacatctga

SEQ ID NO: 4254 - DNA, 18 bp, Glycine max
tttggtgccaatacacaa

SEQ ID NO: 4255 - DNA, 18 bp, Glycine max
acaagcaagccttccaat

SEQ ID NO: 4256 - DNA, 18 bp, Glycine max
ggaggaatgagaggttgg

SEQ ID NO: 4257 - DNA, 18 bp, Glycine max
cggatctcaattccctct

SEQ ID NO: 4258 - DNA, 19 bp, Glycine max
ctccaacgatatcgaacac

SEQ ID NO: 4259 - DNA, 19 bp, Glycine max
caagtcagtggtgctatgc

SEQ ID NO: 4260 - DNA, 22 bp, Glycine max
agtgacttaagcacaaattaaa

SEQ ID NO: 4261 - DNA, 18 bp, Glycine max
tgagcacactagcccaat

SEQ ID NO: 4262 - DNA, 21 bp, Glycine max
ggttgacctgattattgagaa

SEQ ID NO: 4263 - DNA, 18 bp, Glycine max
ccaatgatcccttgagaa

SEQ ID NO: 4264 - DNA, 18 bp, Glycine max
aggctccaagtctccaac

SEQ ID NO: 4265 - DNA, 21 bp, Glycine max
tgaaagatgaacaggaaagaa

SEQ ID NO: 4266 - DNA, 23 bp, Glycine max
aaatataatcccttcattcattt

SEQ ID NO: 4267 - DNA, 25 bp, Glycine max
ggaatataatatactttcttgatcc

SEQ ID NO: 4268 - DNA, 25 bp, Glycine max
tcaattatattcatacatttcactt

SEQ ID NO: 4269 - DNA, 19 bp, Glycine max
tgattcttgaatcggaggt

SEQ ID NO: 4270 - DNA, 18 bp, Glycine max
ccaccacttatgcctagc

SEQ ID NO: 4271 - DNA, 18 bp, Glycine max
tgcttgtacgtgatcgtg

SEQ ID NO: 4272 - DNA, 18 bp, Glycine max
tcccttccaattcctctc

SEQ ID NO: 4273 - DNA, 18 bp, Glycine max
cgtgcgttgttaggttgt

SEQ ID NO: 4274 - DNA, 18 bp, Glycine max
attcccgaatggtaacaa

SEQ ID NO: 4275 - DNA, 18 bp, Glycine max
gatgatctttgcccacat

SEQ ID NO: 4276 - DNA, 19 bp, Glycine max
aacatggtgcgtgatattg

SEQ ID NO: 4277 - DNA, 19 bp, Glycine max
ctccttctcacttcccact

SEQ ID NO: 4278 - DNA, 20 bp, Glycine max
ttgaataccatgaacgatga

SEQ ID NO: 4279 - DNA, 18 bp, Glycine max
aactacagcagccgtgac

SEQ ID NO: 4280 - DNA, 20 bp, Glycine max
agcttggacaaatgtgaaat

SEQ ID NO: 4281 - DNA, 18 bp, Glycine max
accgtggttggaattaaa

SEQ ID NO: 4282 - DNA, 21 bp, Glycine max
gaattcctcgtataaccaaca

SEQ ID NO: 4283 - DNA, 18 bp, Glycine max
cccttggccaaacataat

SEQ ID NO: 4284 - DNA, 22 bp, Glycine max
tttatctactttcttccggttt

SEQ ID NO: 4285 - DNA, 20 bp, Glycine max
aataaaggacagttcggaaa

SEQ ID NO: 4286 - DNA, 21 bp, Glycine max
tgtttgaaggatcatttcatt

SEQ ID NO: 4287 - DNA, 19 bp, Glycine max
ttaagccacttaaatcagg

SEQ ID NO: 4288 - DNA, 19 bp, Glycine max
tgtctgcatccatttgtct

SEQ ID NO: 4289 - DNA, 16 bp, Glycine max
agcgcccaatatcgtt

SEQ ID NO: 4290 - DNA, 18 bp, Glycine max
tgtctttgggtccatctt

SEQ ID NO: 4291 - DNA, 19 bp, Glycine max
tttgcaatagttccattcg

SEQ ID NO: 4292 - DNA, 18 bp, Glycine max
tgtgagggagtgtgttca

SEQ ID NO: 4293 - DNA, 18 bp, Glycine max
tcccaccatagtcccata

SEQ ID NO: 4294 - DNA, 19 bp, Glycine max
cgaagagtatggcaatgaa

SEQ ID NO: 4295 - DNA, 20 bp, Glycine max
tctagtttctgcatttcctg

SEQ ID NO: 4296 - DNA, 18 bp, Glycine max
aattggttggtcacgatg

SEQ ID NO: 4297 - DNA, 18 bp, Glycine max
tgccatttgatgaggaat

SEQ ID NO: 4298 - DNA, 21 bp, Glycine max
acaaattgagccatagtttca

SEQ ID NO: 4299 - DNA, 17 bp, Glycine max
cgcaacctgcagtcata

SEQ ID NO: 4300 - DNA, 19 bp, Glycine max
gccgaaatcagttataccc

SEQ ID NO: 4301 - DNA, 22 bp, Glycine max
gaagctgaattctagacctgtt

SEQ ID NO: 4302 - DNA, 19 bp, Glycine max
aggacgctcaaactttgtt

SEQ ID NO: 4303 - DNA, 18 bp, Glycine max
cggtttgcaaaggtctta

SEQ ID NO: 4304 - DNA, 20 bp, Glycine max
tgagaagttgaatgctcaaa

SEQ ID NO: 4305 - DNA, 18 bp, Glycine max
gcatgcatgtacccagaa

SEQ ID NO: 4306 - DNA, 21 bp, Glycine max
tggaggtaactatcaccctaa

SEQ ID NO: 4307 - DNA, 21 bp, Glycine max
ttccaaacaagtgaagagaaa

SEQ ID NO: 4308 - DNA, 19 bp, Glycine max
caaatgctttgttctttcg

SEQ ID NO: 4309 - DNA, 20 bp, Glycine max
tgagatatttcaagggacag

SEQ ID NO: 4310 - DNA, 18 bp, Glycine max
tctctgcagcttctctgc

SEQ ID NO: 4311 - DNA, 19 bp, Glycine max
agtggaatggaagcagaac

SEQ ID NO: 4312 - DNA, 18 bp, Glycine max
ttctgcttccattccact

SEQ ID NO: 4313 - DNA, 18 bp, Glycine max
gcacctgcagtgtgagtt

SEQ ID NO: 4314 - DNA, 18 bp, Glycine max
tctgcagggagagtggta

SEQ ID NO: 4315 - DNA, 17 bp, Glycine max
tttacgcgcatgacaaa

SEQ ID NO: 4316 - DNA, 19 bp, Glycine max
agaatctcaaccagcttcc

SEQ ID NO: 4317 - DNA, 18 bp, Glycine max
ccctccaagaaattctga

SEQ ID NO: 4318 - DNA, 18 bp, Glycine max
catatgtttgtgcgtcct

SEQ ID NO: 4319 - DNA, 21 bp, Glycine max
tctttcaaattctcaccctta

SEQ ID NO: 4320 - DNA, 18 bp, Glycine max
aatgtgcattggtttcaa

SEQ ID NO: 4321 - DNA, 21 bp, Glycine max
aagctaattaaccgagttcgt

SEQ ID NO: 4322 - DNA, 17 bp, Glycine max
cttcccgtaagccacac

SEQ ID NO: 4323 - DNA, 18 bp, Glycine max
caattggccgattattga

SEQ ID NO: 4324 - DNA, 20 bp, Glycine max
tccaactcactcctcataca

SEQ ID NO: 4325 - DNA, 25 bp, Glycine max
agagacatagagtattagccataaa

SEQ ID NO: 4326 - DNA, 25 bp, Glycine max
aattcttgttaaaggatcataacat

SEQ ID NO: 4327 - DNA, 22 bp, Glycine max
ttaatttgtccaaactttaatc

SEQ ID NO: 4328 - DNA, 21 bp, Glycine max
tttatgattaaagtttggaca

SEQ ID NO: 4329 - DNA, 19 bp, Glycine max
aatcatatttgtgctcacg

SEQ ID NO: 4330 - DNA, 24 bp, Glycine max
cttgatatctctacattgatgttt

SEQ ID NO: 4331 - DNA, 18 bp, Glycine max
agcaagcttcactcacca

SEQ ID NO: 4332 - DNA, 18 bp, Glycine max
ccaccatacatccaccat

SEQ ID NO: 4333 - DNA, 18 bp, Glycine max
gcattgcccacaataaac

SEQ ID NO: 4334 - DNA, 18 bp, Glycine max
gggagtgcactttacagg

SEQ ID NO: 4335 - DNA, 22 bp, Glycine max
aaatttgtgttgagtctctaat

SEQ ID NO: 4336 - DNA, 18 bp, Glycine max
aagctaggccaaggtaca

SEQ ID NO: 4337 - DNA, 21 bp, Glycine max
tgtccattaattgaaatcctc

SEQ ID NO: 4338 - DNA, 24 bp, Glycine max
tttatccttatactggacatgaaa

SEQ ID NO: 4339 - DNA, 18 bp, Glycine max
atcacttgccctgcatta

SEQ ID NO: 4340 - DNA, 18 bp, Glycine max
acttcttcgctggaaacc

SEQ ID NO: 4341 - DNA, 18 bp, Glycine max
cgaggctagggtttagga

SEQ ID NO: 4342 - DNA, 16 bp, Glycine max
gtgggtgggaaaggaa

SEQ ID NO: 4343 - DNA, 19 bp, Glycine max
tgcttccaagaactcctct

SEQ ID NO: 4344 - DNA, 18 bp, Glycine max
gaagacttccctgcatca

SEQ ID NO: 4345 - DNA, 19 bp, Glycine max
tcaagtaggccacagatga

SEQ ID NO: 4346 - DNA, 19 bp, Glycine max
tgcctgcctatgttagatg

SEQ ID NO: 4347 - DNA, 18 bp, Glycine max
gccggcaaattggtaata

SEQ ID NO: 4348 - DNA, 19 bp, Glycine max
tgcatacatggtacccaaa

SEQ ID NO: 4349 - DNA, 19 bp, Glycine max
ggatggatatatgcccaga

SEQ ID NO: 4350 - DNA, 17 bp, Glycine max
catcccgctccaaataa

SEQ ID NO: 4351 - DNA, 18 bp, Glycine max
gctggagttgcatgtgtt

SEQ ID NO: 4352 - DNA, 18 bp, Glycine max
caggataggcgacagaca

SEQ ID NO: 4353 - DNA, 18 bp, Glycine max
cacgtgttggtgtggttt

SEQ ID NO: 4354 - DNA, 17 bp, Glycine max
atgcgtgctctttagcc

SEQ ID NO: 4355 - DNA, 18 bp, Glycine max
gcatgcgtatgcaagtat

SEQ ID NO: 4356 - DNA, 20 bp, Glycine max
aaataatgattcgaaggaaa

SEQ ID NO: 4357 - DNA, 22 bp, Glycine max
aaattgagagtaagatggctgt

SEQ ID NO: 4358 - DNA, 20 bp, Glycine max
aaataatgattcgaaggaaa

SEQ ID NO: 4359 - DNA, 22 bp, Glycine max
aaattgagagtaagatggctgt

SEQ ID NO: 4360 - DNA, 21 bp, Glycine max
tgacaaagtgttgagattacg

SEQ ID NO: 4361 - DNA, 18 bp, Glycine max
tcacaggatccaaacaca

SEQ ID NO: 4362 - DNA, 18 bp, Glycine max
ttatgcaactgcctttcc

SEQ ID NO: 4363 - DNA, 18 bp, Glycine max
aggtgccaagacacattg

SEQ ID NO: 4364 - DNA, 18 bp, Glycine max
atccagaacaacaaatgg

SEQ ID NO: 4365 - DNA, 18 bp, Glycine max
gatcaccgtggtgaatgt

SEQ ID NO: 4366 - DNA, 18 bp, Glycine max
ggccaagctgacttgtaa

SEQ ID NO: 4367 - DNA, 18 bp, Glycine max
agtgcacctcgaattgat

SEQ ID NO: 4368 - DNA, 18 bp, Glycine max
gccacacacacatcatca

SEQ ID NO: 4369 - DNA, 19 bp, Glycine max
ggccaaacttgagaaagag

SEQ ID NO: 4370 - DNA, 25 bp, Glycine max
aatacgcttattctacatataattt

SEQ ID NO: 4371 - DNA, 21 bp, Glycine max
cgtaacataactgtcagtcca

SEQ ID NO: 4372 - DNA, 18 bp, Glycine max
ttggctctttgctctcag

SEQ ID NO: 4373 - DNA, 18 bp, Glycine max
caaggtggatggatagga

SEQ ID NO: 4374 - DNA, 18 bp, Glycine max
ttggctctttgctctcag

SEQ ID NO: 4375 - DNA, 18 bp, Glycine max
tcttcaaggtggatggat

SEQ ID NO: 4376 - DNA, 21 bp, Glycine max
aagtcacggtcataagttcaa

SEQ ID NO: 4377 - DNA, 24 bp, Glycine max
tgattatatggaaagatcaagttt

SEQ ID NO: 4378 - DNA, 19 bp, Glycine max
gaggtcatgtccaacaaca

SEQ ID NO: 4379 - DNA, 18 bp, Glycine max
gcaacaagcagcacataa

SEQ ID NO: 4380 - DNA, 21 bp, Glycine max
aaatcacttcatttggatcag

SEQ ID NO: 4381 - DNA, 18 bp, Glycine max
tgcttcatgcagtttgtg

SEQ ID NO: 4382 - DNA, 21 bp, Glycine max
aggaaatgtaaaggttcaact

SEQ ID NO: 4383 - DNA, 18 bp, Glycine max
ctcggaatcctgtgacat

SEQ ID NO: 4384 - DNA, 21 bp, Glycine max
ttgtaacacgcttctaatgaa

SEQ ID NO: 4385 - DNA, 24 bp, Glycine max
tttataggagttctttcatcattt

SEQ ID NO: 4386 - DNA, 18 bp, Glycine max
gttcttcacgaccagcac

SEQ ID NO: 4387 - DNA, 18 bp, Glycine max
tgcctttgtctacgtgtg

SEQ ID NO: 4388 - DNA, 19 bp, Glycine max
tttgagcaacttacaatca

SEQ ID NO: 4389 - DNA, 18 bp, Glycine max
gtttgagtttggcccatt

SEQ ID NO: 4390 - DNA, 20 bp, Glycine max
ccagattattgaccatgtcc

SEQ ID NO: 4391 - DNA, 19 bp, Glycine max
ttattcttccgttgccttt

SEQ ID NO: 4392 - DNA, 20 bp, Glycine max
gtggaatatgcatgttgttg

SEQ ID NO: 4393 - DNA, 20 bp, Glycine max
aaagttatcttcagccgttg

SEQ ID NO: 4394 - DNA, 23 bp, Glycine max
tttaaagtagtatctcgtgcatt

SEQ ID NO: 4395 - DNA, 20 bp, Glycine max
ccgcagttaatggtaagaac

SEQ ID NO: 4396 - DNA, 20 bp, Glycine max
aaacgcttatagtttgcttt

SEQ ID NO: 4397 - DNA, 21 bp, Glycine max
gtgagtcaagcaagtttcatt

SEQ ID NO: 4398 - DNA, 18 bp, Glycine max
taccgacaagggagatga

SEQ ID NO: 4399 - DNA, 19 bp, Glycine max
ttgcacataggcatataaa

SEQ ID NO: 4400 - DNA, 18 bp, Glycine max
ttggtcctccctcgtact

SEQ ID NO: 4401 - DNA, 18 bp, Glycine max
tgtgaagcggagaagaag

SEQ ID NO: 4402 - DNA, 18 bp, Glycine max
cttcttctccgcttcaca

SEQ ID NO: 4403 - DNA, 18 bp, Glycine max
ggacggttccagaaagag

SEQ ID NO: 4404 - DNA, 18 bp, Glycine max
cttcttctccgcttcaca

SEQ ID NO: 4405 - DNA, 18 bp, Glycine max
ggacggttccagaaagag

SEQ ID NO: 4406 - DNA, 18 bp, Glycine max
ccacttggactcatgcaa

SEQ ID NO: 4407 - DNA, 22 bp, Glycine max
tcttcgtctttatgaatttctg

SEQ ID NO: 4408 - DNA, 21 bp, Glycine max
caatcacacattgtttcttga

SEQ ID NO: 4409 - DNA, 19 bp, Glycine max
catttccttacaaggctga

SEQ ID NO: 4410 - DNA, 18 bp, Glycine max
aagaggcccagaattgtc

SEQ ID NO: 4411 - DNA, 18 bp, Glycine max
gcagtaacatcggtgagc

SEQ ID NO: 4412 - DNA, 19 bp, Glycine max
tttcgcttctgtgaaagat

SEQ ID NO: 4413 - DNA, 20 bp, Glycine max
acgttctttcttggattgaa

SEQ ID NO: 4414 - DNA, 18 bp, Glycine max
tgtccaacgagtccattt

SEQ ID NO: 4415 - DNA, 25 bp, Glycine max
aatgaataattaatgtcatcttgaa

SEQ ID NO: 4416 - DNA, 18 bp, Glycine max
gccatgtgagcaatctct

SEQ ID NO: 4417 - DNA, 18 bp, Glycine max
cagttggtgagtgggttc

SEQ ID NO: 4418 - DNA, 18 bp, Glycine max
ggcaaacagtccaacatc

SEQ ID NO: 4419 - DNA, 18 bp, Glycine max
gatctcccgagaaatgct

SEQ ID NO: 4420 - DNA, 18 bp, Glycine max
acagcttctggcagcata

SEQ ID NO: 4421 - DNA, 23 bp, Glycine max
tgggaattatttgtagtacccta

SEQ ID NO: 4422 - DNA, 18 bp, Glycine max
cgtctccgaagaacacat

SEQ ID NO: 4423 - DNA, 18 bp, Glycine max
taacgacgactcggctaa

SEQ ID NO: 4424 - DNA, 22 bp, Glycine max
tgaatctctagtgaacttgtgc

SEQ ID NO: 4425 - DNA, 18 bp, Glycine max
tccgcaacattaaacctc

SEQ ID NO: 4426 - DNA, 22 bp, Glycine max
tcaacatatgagtggaagagaa

SEQ ID NO: 4427 - DNA, 17 bp, Glycine max
ttagatgcgcccacatt

SEQ ID NO: 4428 - DNA, 21 bp, Glycine max
aaacaagactcatcttgaact

SEQ ID NO: 4429 - DNA, 19 bp, Glycine max
tctgttaacccgtctgtca

SEQ ID NO: 4430 - DNA, 19 bp, Glycine max
aaacttggacttgctcgtt

SEQ ID NO: 4431 - DNA, 19 bp, Glycine max
ttgagctcgtttggttaaa

SEQ ID NO: 4432 - DNA, 21 bp, Glycine max
cgcttatctaatggtatttgc

SEQ ID NO: 4433 - DNA, 18 bp, Glycine max
gtggccattcagatttca

SEQ ID NO: 4434 - DNA, 23 bp, Glycine max
ggctaacacatgttaattgatct

SEQ ID NO: 4435 - DNA, 18 bp, Glycine max
aacggcggaactcataat

SEQ ID NO: 4436 - DNA, 19 bp, Glycine max
cattgctggattcacactc

SEQ ID NO: 4437 - DNA, 19 bp, Glycine max
ttcaagtcgtacgttctcc

SEQ ID NO: 4438 - DNA, 21 bp, Glycine max
gaccaatgaataccaaattga

SEQ ID NO: 4439 - DNA, 18 bp, Glycine max
tcacagaaaggtcgagga

SEQ ID NO: 4440 - DNA, 18 bp, Glycine max
atggaaccactcacaacg

SEQ ID NO: 4441 - DNA, 23 bp, Glycine max
aattaaattcatttgagagaaca

SEQ ID NO: 4442 - DNA, 22 bp, Glycine max
tcttgtccaaatacaagaaaca

SEQ ID NO: 4443 - DNA, 18 bp, Glycine max
tgactgaccggttgaact

SEQ ID NO: 4444 - DNA, 19 bp, Glycine max
tcctacacattccgttcaa

SEQ ID NO: 4445 - DNA, 22 bp, Glycine max
gaacaatcagttaattcgaggt

SEQ ID NO: 4446 - DNA, 18 bp, Glycine max
cgtgttcgatcaacttcc

SEQ ID NO: 4447 - DNA, 21 bp, Glycine max
tcatgatcctcgatctatatt

SEQ ID NO: 4448 - DNA, 18 bp, Glycine max
ttggacttggacatttgg

SEQ ID NO: 4449 - DNA, 19 bp, Glycine max
aagttaggccaaacacttt

SEQ ID NO: 4450 - DNA, 18 bp, Glycine max
ggaaggagcccatctaaa

SEQ ID NO: 4451 - DNA, 20 bp, Glycine max
gcgttagggatacctattca

SEQ ID NO: 4452 - DNA, 18 bp, Glycine max
caaccaccttcactctcg

SEQ ID NO: 4453 - DNA, 19 bp, Glycine max
tccctctctctccctctct

SEQ ID NO: 4454 - DNA, 18 bp, Glycine max
ttggcagacagagacagg

SEQ ID NO: 4455 - DNA, 19 bp, Glycine max
agttgaaacttccttccaa

SEQ ID NO: 4456 - DNA, 18 bp, Glycine max
tgggcaaatgtacaggag

SEQ ID NO: 4457 - DNA, 20 bp, Glycine max
tgctatgggtaactcagtcc

SEQ ID NO: 4458 - DNA, 22 bp, Glycine max
cgtgaatgtgtatatgtgtgtg

SEQ ID NO: 4459 - DNA, 23 bp, Glycine max
aaattgaataaatgtaatgagga

SEQ ID NO: 4460 - DNA, 19 bp, Glycine max
aatgcaacatcctgagtga

SEQ ID NO: 4461 - DNA, 25 bp, Glycine max
ctataaatagacacataaggagaaa

SEQ ID NO: 4462 - DNA, 18 bp, Glycine max
tgatggtggcaataatga

SEQ ID NO: 4463 - DNA, 16 bp, Glycine max
gggtggttgggagttt

SEQ ID NO: 4464 - DNA, 19 bp, Glycine max
gggacaaacaggaaagaag

SEQ ID NO: 4465 - DNA, 18 bp, Glycine max
aatggcaattggttgaaa

SEQ ID NO: 4466 - DNA, 18 bp, Glycine max
aacgggaagcaagagatt

SEQ ID NO: 4467 - DNA, 18 bp, Glycine max
tcgacttcgaggagttca

SEQ ID NO: 4468 - DNA, 22 bp, Glycine max
aaacatgaaggaattgatctct

SEQ ID NO: 4469 - DNA, 19 bp, Glycine max
cctgcatatgtcacgagtt

SEQ ID NO: 4470 - DNA, 18 bp, Glycine max
ggagctttgagggttgat

SEQ ID NO: 4471 - DNA, 20 bp, Glycine max
aaacaacatcaggaaacaaa

SEQ ID NO: 4472 - DNA, 19 bp, Glycine max
cagctcctttgtctttcct

SEQ ID NO: 4473 - DNA, 19 bp, Glycine max
ctcaaatgatgtcccatga

SEQ ID NO: 4474 - DNA, 18 bp, Glycine max
ccaggatattcacgctgt

SEQ ID NO: 4475 - DNA, 19 bp, Glycine max
tgccaaataccataaacca

SEQ ID NO: 4476 - DNA, 18 bp, Glycine max
ggctggtatgcacttgac

SEQ ID NO: 4477 - DNA, 18 bp, Glycine max
atatggtcagaagccgta

SEQ ID NO: 4478 - DNA, 18 bp, Glycine max
tggatcgatgtctattgc

SEQ ID NO: 4479 - DNA, 18 bp, Glycine max
accctcgtcaagagcttc

SEQ ID NO: 4480 - DNA, 18 bp, Glycine max
gaaactgtgcaggagtgc

SEQ ID NO: 4481 - DNA, 18 bp, Glycine max
aggaagggatatggatgg

SEQ ID NO: 4482 - DNA, 18 bp, Glycine max
aatcgcattgtcctgaaa

SEQ ID NO: 4483 - DNA, 18 bp, Glycine max
atgtcatgtgctgccata

SEQ ID NO: 4484 - DNA, 18 bp, Glycine max
ttcgctgcagttgttcat

SEQ ID NO: 4485 - DNA, 18 bp, Glycine max
caccatctctatgcgtga

SEQ ID NO: 4486 - DNA, 18 bp, Glycine max
gctatgtgccaaagcatc

SEQ ID NO: 4487 - DNA, 18 bp, Glycine max
gcttgacctgtgtccttg

SEQ ID NO: 4488 - DNA, 22 bp, Glycine max
ttagatcatagatgtcttggaa

SEQ ID NO: 4489 - DNA, 18 bp, Glycine max
atgaggtgtgcccataaa

SEQ ID NO: 4490 - DNA, 20 bp, Glycine max
tccaacttaccttgttgtcc

SEQ ID NO: 4491 - DNA, 18 bp, Glycine max
gtgcatgtgagctagcaa

SEQ ID NO: 4492 - DNA, 18 bp, Glycine max
ttgagggtatgctccaac

SEQ ID NO: 4493 - DNA, 19 bp, Glycine max
tgcccattgtatgtgattt

SEQ ID NO: 4494 - DNA, 19 bp, Glycine max
cccattacctagccaattc

SEQ ID NO: 4495 - DNA, 20 bp, Glycine max
gaggtaggcatattcacctg

SEQ ID NO: 4496 - DNA, 21 bp, Glycine max
gcatattccaatttgtaagca

SEQ ID NO: 4497 - DNA, 18 bp, Glycine max
cgtgcacgttatcacaga

SEQ ID NO: 4498 - DNA, 19 bp, Glycine max
ttggttagaaagtgccaaa

SEQ ID NO: 4499 - DNA, 19 bp, Glycine max
tcaaacttcaaagcccata

SEQ ID NO: 4500 - DNA, 18 bp, Glycine max
acaattgcccgactatca

SEQ ID NO: 4501 - DNA, 18 bp, Glycine max
ctttgatgaccaccatgc

SEQ ID NO: 4502 - DNA, 20 bp, Glycine max
tcccaaacacatctttaaca

SEQ ID NO: 4503 - DNA, 18 bp, Glycine max
tcatccatccacacattg

SEQ ID NO: 4504 - DNA, 19 bp, Glycine max
ttccatttgaatctcaagc

SEQ ID NO: 4505 - DNA, 21 bp, Glycine max
accatcactgcataataattt

SEQ ID NO: 4506 - DNA, 18 bp, Glycine max
ccacagggactttgtttg

SEQ ID NO: 4507 - DNA, 18 bp, Glycine max
gcagacaaggcaagtcag

SEQ ID NO: 4508 - DNA, 19 bp, Glycine max
ttggttcattgtttcgttt

SEQ ID NO: 4509 - DNA, 19 bp, Glycine max
tgcataacattgggagatg

SEQ ID NO: 4510 - DNA, 18 bp, Glycine max
ccacagggactttgtttg

SEQ ID NO: 4511 - DNA, 18 bp, Glycine max
gcagacaaggcaagtcag

SEQ ID NO: 4512 - DNA, 19 bp, Glycine max
acacttgggcttaatgtca

SEQ ID NO: 4513 - DNA, 19 bp, Glycine max
ggacctgcaaataaagagg

SEQ ID NO: 4514 - DNA, 19 bp, Glycine max
tgaacaagcacagtacgaa

SEQ ID NO: 4515 - DNA, 18 bp, Glycine max
agggaattgaatgggatt

SEQ ID NO: 4516 - DNA, 22 bp, Glycine max
gctataagctagctccttcaaa

SEQ ID NO: 4517 - DNA, 18 bp, Glycine max
attaactcgggcgtctgt

SEQ ID NO: 4518 - DNA, 18 bp, Glycine max
tcccttatggcgtgtatg

SEQ ID NO: 4519 - DNA, 19 bp, Glycine max
ttggttgacccattaatca

SEQ ID NO: 4520 - DNA, 17 bp, Glycine max
agccattcaccatccat

SEQ ID NO: 4521 - DNA, 17 bp, Glycine max
gaatgccggaattgtgt

SEQ ID NO: 4522 - DNA, 19 bp, Glycine max
tttgttgcaggtacaaacc

SEQ ID NO: 4523 - DNA, 17 bp, Glycine max
tcatgcctgcctcattt

SEQ ID NO: 4524 - DNA, 19 bp, Glycine max
tttgttgcaggtacaaacc

SEQ ID NO: 4525 - DNA, 17 bp, Glycine max
tcatgcctgcctcattt

SEQ ID NO: 4526 - DNA, 19 bp, Glycine max
ggattcccaattgagtcac

SEQ ID NO: 4527 - DNA, 22 bp, Glycine max
tgtgtgtaagtaaactcccatc

SEQ ID NO: 4528 - DNA, 18 bp, Glycine max
aataatgggcggttaagg

SEQ ID NO: 4529 - DNA, 18 bp, Glycine max
aaacagtgggtgcataga

SEQ ID NO: 4530 - DNA, 18 bp, Glycine max
ccagctgacctgaactga

SEQ ID NO: 4531 - DNA, 18 bp, Glycine max
gccacactgtcccactta

SEQ ID NO: 4532 - DNA, 18 bp, Glycine max
caccgcaatagctacgtt

SEQ ID NO: 4533 - DNA, 18 bp, Glycine max
cagtgccggagagtaaca

SEQ ID NO: 4534 - DNA, 18 bp, Glycine max
atttggagcgaagcagat

SEQ ID NO: 4535 - DNA, 20 bp, Glycine max
caagcacaaatacgaaacaa

SEQ ID NO: 4536 - DNA, 18 bp, Glycine max
tgttactctccggcactg

SEQ ID NO: 4537 - DNA, 18 bp, Glycine max
agcagcagcagcatagtc

SEQ ID NO: 4538 - DNA, 21 bp, Glycine max
aaacgttcaaacttacaatca

SEQ ID NO: 4539 - DNA, 18 bp, Glycine max
aagggacaacgggattag

SEQ ID NO: 4540 - DNA, 18 bp, Glycine max
gagtcctcgtcgcaatag

SEQ ID NO: 4541 - DNA, 17 bp, Glycine max
gcgaaacagcaacaaca

SEQ ID NO: 4542 - DNA, 23 bp, Glycine max
aactgtaacatcaaatgaaatga

SEQ ID NO: 4543 - DNA, 18 bp, Glycine max
cctaagaatggcctttgg

SEQ ID NO: 4544 - DNA, 18 bp, Glycine max
ccattgagggctttacaa

SEQ ID NO: 4545 - DNA, 18 bp, Glycine max
tccaagggacagaagaca

SEQ ID NO: 4546 - DNA, 25 bp, Glycine max
tggattcaaatatataagattaggg

SEQ ID NO: 4547 - DNA, 18 bp, Glycine max
tacgactcgaacccagtg

SEQ ID NO: 4548 - DNA, 18 bp, Glycine max
ggtggagaattggaggtt

SEQ ID NO: 4549 - DNA, 18 bp, Glycine max
tgcacctcaacaacatga

SEQ ID NO: 4550 - DNA, 18 bp, Glycine max
aagtggtgcacgtatggt

SEQ ID NO: 4551 - DNA, 19 bp, Glycine max
agccaagcaatatcaacct

SEQ ID NO: 4552 - DNA, 19 bp, Glycine max
ggtgtattgctttcccatt

SEQ ID NO: 4553 - DNA, 23 bp, Glycine max
agttcatcactctctctctcaaa

SEQ ID NO: 4554 - DNA, 18 bp, Glycine max
ttgagagcccagcaataa

SEQ ID NO: 4555 - DNA, 25 bp, Glycine max
aaagatagatggaaagagatataaa

SEQ ID NO: 4556 - DNA, 18 bp, Glycine max
tgcccgactatcaacaat

SEQ ID NO: 4557 - DNA, 19 bp, Glycine max
tgcttgttatcgtggtgtt

SEQ ID NO: 4558 - DNA, 25 bp, Glycine max
tttatatctctttccatctatcttt

SEQ ID NO: 4559 - DNA, 25 bp, Glycine max
cagtagttcatcaaataactgttta

SEQ ID NO: 4560 - DNA, 18 bp, Glycine max
gcttgacctgtgtccttg

SEQ ID NO: 4561 - DNA, 18 bp, Glycine max
gctatgtgccaaagcatc

SEQ ID NO: 4562 - DNA, 17 bp, Glycine max
gtttcgcaaggtgtcgt

SEQ ID NO: 4563 - DNA, 17 bp, Glycine max
cgaggaggagctgaaga

SEQ ID NO: 4564 - DNA, 17 bp, Glycine max
aaaccaatcggcatctg

SEQ ID NO: 4565 - DNA, 23 bp, Glycine max
ccctaactagcatgttacaaaga

SEQ ID NO: 4566 - DNA, 17 bp, Glycine max
gtttcgcaaggtgtcgt

SEQ ID NO: 4567 - DNA, 17 bp, Glycine max
cgaggaggagctgaaga

SEQ ID NO: 4568 - DNA, 18 bp, Glycine max
aagcatgatggatggatg

SEQ ID NO: 4569 - DNA, 18 bp, Glycine max
gcatgcgaagaggtaatg

SEQ ID NO: 4570 - DNA, 18 bp, Glycine max
ccgaattacccttctcca

SEQ ID NO: 4571 - DNA, 20 bp, Glycine max
tgaaggacatgagacaaatg

SEQ ID NO: 4572 - DNA, 18 bp, Glycine max
gcatgcgtttctcttctt

SEQ ID NO: 4573 - DNA, 18 bp, Glycine max
ggatatgccattcccatc

SEQ ID NO: 4574 - DNA, 19 bp, Glycine max
tgattgtacggtctcatgg

SEQ ID NO: 4575 - DNA, 23 bp, Glycine max
tgattataactccaaacctttct

SEQ ID NO: 4576 - DNA, 21 bp, Glycine max
tttgttatgcatgtgtgttgt

SEQ ID NO: 4577 - DNA, 19 bp, Glycine max
aagtatgttgttgccttgc

SEQ ID NO: 4578 - DNA, 18 bp, Glycine max
tcctagctagccatgcag

SEQ ID NO: 4579 - DNA, 23 bp, Glycine max
cactattaagcatcaaaggagtt

SEQ ID NO: 4580 - DNA, 18 bp, Glycine max
ccagaagttccctcccta

SEQ ID NO: 4581 - DNA, 18 bp, Glycine max
aaccaaagcaacaatcca

SEQ ID NO: 4582 - DNA, 25 bp, Glycine max
ttgttattgattgtttaagtgattt

SEQ ID NO: 4583 - DNA, 21 bp, Glycine max
aaagtccatcctcttaaattc

SEQ ID NO: 4584 - DNA, 23 bp, Glycine max
aaagtccctataccaggtagatt

SEQ ID NO: 4585 - DNA, 18 bp, Glycine max
ttcaacactggaaggaaa

SEQ ID NO: 4586 - DNA, 18 bp, Glycine max
tgccagcaacactctctt

SEQ ID NO: 4587 - DNA, 19 bp, Glycine max
tttggtgggtcctatttct

SEQ ID NO: 4588 - DNA, 18 bp, Glycine max
gtcaaaggtcccatagca

SEQ ID NO: 4589 - DNA, 23 bp, Glycine max
tttcaagttagttatcttgtcca

SEQ ID NO: 4590 - DNA, 18 bp, Glycine max
cccaagcttgattgagaa

SEQ ID NO: 4591 - DNA, 18 bp, Glycine max
cgcagaaaggaagacaag

SEQ ID NO: 4592 - DNA, 23 bp, Glycine max
ggatattggtataaattgccttt

SEQ ID NO: 4593 - DNA, 21 bp, Glycine max
aatgaattgcaaatactggaa

We claim:

1. An SSR-containing soybean DNA locus which is useful for genotyping between at least two varieties of soybean and comprising genomic sequence adjacent to an SSR; wherein said genomic sequence is at least 90% identical to the sequence of a reference polynucleotide of at least 20 consecutive nucleotides which are adjacent to an SSR identified in Table 1 or the complement of such reference polynucleotide, but excluding the public SSR markers of SEQ ID NO:8 (Satt315), SEQ ID NO:58 (Satt632), SEQ ID NO: 182 (Sat_{—}162), SEQ ID NO:472 (Satt424), SEQ ID NO:560 (Satt275), SEQ ID NO:658 (Satt163), SEQ ID NO:798 (Sat 168), SEQ ID NO:819 (Satt309), SEQ ID NO:1063 (Sat_{—}141), SEQ ID NO:1065 (Sat 163), SEQ ID NO:1181 (Satt610), SEQ ID NO:1249 (Satt570) and SEQ ID NO:1303 (Satt235).

2. An SSR-containing soybean DNA locus according to claim 1 wherein said sequence of the locus is at least 95% identical to the sequence of the reference polynucleotide.

3. A data set of DNA sequences comprising up to a finite number of distinct sequences of loci according to claim 1 wherein said finite number is selected from the group consisting of 2, 5, 10, 25, 40, 75, 100, 500 and 1000.

4. A computer readable medium having recorded thereon a genetic or physical map of at least part of the soybean genome comprising map positions of two or more SSR-containing loci according to claim 1.

5. A computer readable medium according to claim 4 wherein said genetic or physical map for soybean comprises mapped SSR-containing loci for soybean chromosomes identified as linkage group G or A2.

6. A computer readable medium according to claim 4 wherein said map for soybean is as represented by Table 1.

7. An isolated nucleic acid molecule useful for detecting an SSR-containing locus in soybean DNA, wherein said nucleic acid molecule comprises at least 18 nucleotide bases, and wherein the sequence of said at least 18 nucleotide bases is at least 90 percent identical to a sequence of the same number of consecutive nucleotides in either strand of a segment of soybean DNA in a locus of claim 1 comprising said SSR-containing locus.

8. An isolated nucleic acid molecule according to claim 7 comprising at least 20 nucleotide bases.

9. A pair of isolated nucleic acid molecules useful for PCR amplification of a segment of soybean DNA comprising at least one SSR, wherein each nucleic acid molecule of said pair comprises at least 18 nucleotide bases and wherein the nucleotide sequence of one of said molecules is at least 90 percent identical to a sequence of the same number of consecutive nucleotides in one strand of a segment of soybean DNA in a locus of claim 1 comprising said polymorphism and the sequence of the other of said molecules is at least 90 percent identical to a sequence of the same number of consecutive nucleotides in the other strand of the segment of soybean DNA in said locus.

10. A pair of isolated nucleic acid molecules according to claim 9, wherein said first and second sequences flank an SSR in the locus according to claim 1 identified by SEQ ID NO:“n”, said pair comprising the sequences of SEQ ID NO: (1531+2n−1) and SEQ ID NO: (1531+2n), where “n” is an number between 1 and 1531.

11. A collection of at least up to a finite number of pairs of isolated nucleic acid molecules according to claim 10 wherein said finite number is selected from the group consisting of 2, 5, 10, 25, 40, 75, 100, 500 and 1000.

12. A method of finding polymorphisms in soybean DNA comprising comparing DNA sequence in at least two soybean lines wherein said sequence is selected by using a segment of a locus of claim 1.

13. A method according to claim 12 wherein said sequence is selected as being at least 80% identical to sequence of said locus.

14. A method of genotyping comprising assaying DNA or mRNA from tissue of at least one soybean line to identify the presence of a nucleic acid polymorphism linked to a locus of claim 1.

15. A method of genotyping according to claim 14 wherein said polymorphism is a mapped SSR-containing locus of claim 1.

16. A method according to claim 14 further comprising identifying one or more phenotypic traits for at least two soybean lines and determining associations between said traits and polymorphisms.

17. A method according to claim 14 wherein lines with complementary traits are identified and selected for breeding to introgress a phenotype.

18. A method according to claim 14 wherein said assaying employs sufficient nucleic acid molecules to identify the presence of at least up to a finite number distinct SSR-containing loci wherein said finite number is selected from the group consisting of 2, 5, 10, 25, 40, 75, 100, 500, 1000, 2000, 3000, 4000 and 5000.

19. A method of investigating a soybean allele comprising determining the presence of an SSR in the nucleic acid sequence of nucleic acid molecules isolated from one or more soybean plants wherein said SSR is linked to a locus of claim 1.

20. A method of mapping soybean genomic sequence comprising identifying the presence of a mapped SSR in said sequence, wherein said mapped SSR is linked to a locus of claim 1.

21. A method according to claim 20 wherein said mapped SSR is in a locus of claim 1.

22. A method according to claim 21 comprising identifying the presence of at least a finite number of said mapped SSRs, wherein said finite number is selected from the group consisting of 2, 5, 10, 25, 40, 75, 100, 500 and 1000.

23. A method of breeding soybean comprising selecting a soybean line having an SSR associated by linkage disequilibrium to a trait of interest wherein said SSR is linked to a locus of claim 1.

24. A method according to claim 23 comprising selecting a soybean line having at least a finite number of said mapped SSRs, wherein said finite number is selected from the group consisting of 2, 5, 10, 25, 40, 75, 100, 500 and 1000.

25. A method of associating a phenotype trait to a genotype in soybean comprising
(a) identifying a set of one or more distinct phenotypic traits characterizing said soybean plants,
(b) selecting tissue from at least two soybean plants having allelic DNA and assaying DNA or mRNA from said tissue to identify the presence or absence of a set of distinct SSR polymorphisms,
(c) identifying associations between said set of polymorphisms and said set of phenotypic traits,
wherein said set of polymorphisms comprises at least one SSR linked to a locus of claim 1.

26. A method of associating a phenotype trait to a genotype in soybean according to claim 25 wherein said set of polymorphisms comprises at least 10 SSRs linked to mapped SSRs of claim 1.

27. A method of associating a phenotype trait to a genotype in soybean according to claim 26 wherein said set of polymorphisms are linked to at least a finite number of said loci, wherein said finite number is selected from the group consisting of 2, 5, 10, 25, 40, 75, 100, 500 and 1000.

28. A method of associating a trait to a genotype in soybean according to claim 27 wherein the soybean plants are in a segregating population; wherein said DNA is allelic in a loci of a chromosome which confers a phenotypic effect on a trait of interest and wherein a polymorphism is located in said loci; and wherein the degree of association among said polymorphisms and between said polymorphisms and the traits permits determination of a linear order of the polymorphism and the trait loci.

29. A method according to clam 28 wherein at least 5 polymorphisms are linked to said loci permitting disequilibrium mapping of said loci.

30. A method identifying genes associated with a trait of interest comprising identifying linkage of at least one SSR polymorphism to said trait of interest, wherein said polymorphism is linked to a locus of claim 1, identifying a genomic clone containing said locus and identifying genes linked to said locus.

31. A method according to claim 30 further comprising using said association in marker assisted breeding

32. A method according to claim 30 further comprising using association in marker assisted selection.

33. A method comprising screening for a trait comprising:
(a) interrogating a collection of SSR polymorphism wherein said collection has an average density of less than 10 cM on a genetic map of soybean; and
(b) correlating the presence or absence of an SSR polymorphism within said collection with said trait.
wherein said SSR polymorphisms are linked to loci of claim 1.

34. A method of soybean breeding comprising:
(A) crossing an first soybean line with a second soybean line to produce a segregating population;
(B) screening the segregating population with a DNA molecular marker for a member plant having an allele derived from said first line, wherein the allele is associated with a QTL or gene of interest; and
(C) selecting for further crossing and selection a member plant having said allele;
wherein said DNA molecular marker is an SSR polymorphic locus of claim 1.
